(19) United States
(12) Patent Application Publication
(10) Pub. No.: US 2016/0304926 A1
(43) Pub. Date: Oct. 20, 2016

(54) Synthesis of L-Nucleic Acids by Means of an Enzyme

(71) Applicant: NOXXON PHARMA AG, Berlin (DE)

(72) Inventors: Andreas Pech, Halle (DE); Florian Jarosch, Berlin (DE); Michael Jahnz, Berlin (DE); Sven Klussmann, Berlin (DE); Ralf David, Leipzig (DE)

(73) Assignee: NOXXON Pharma AG, Berlin (DE)

(21) Appl. No.: 15/038,049

(22) PCT Filed: Nov. 20, 2014
(86) PCT No.: PCT/EP14/03102

§ 371 Date: Jun. 29, 2016

(30) Foreign Application Priority Data
Nov. 20, 2013 (EP) 13 005 449.7

(51) Int. Cl. C12P 19/34; C12N 9/12; C12Q 1/68

(52) U.S. Cl. CPC C12P 19/34; C12Q 1/6806; C12N 9/1252; C12Y 207/07007

(57) ABSTRACT

The present invention is related to a method for adding one or more L-nucleotides to the 3′end of a first L-nucleic acid, wherein the method comprises the step of reacting the one or more L-nucleotides with the first L-nucleic acid in the presence of a protein comprising a mutant enzymatic activity exhibiting moiety, wherein the enzymatic activity is capable of adding one or more L-nucleotides to the 3′ end of the first L-nucleic acid, wherein the mutant enzymatic activity exhibiting moiety comprises an amino acid sequence, wherein the amino acids of the amino acid sequence are D-amino acids, wherein the mutant enzymatic activity exhibiting moiety is a variant of an enzymatic activity exhibiting moiety, wherein the enzymatic activity exhibiting moiety consists of an amino acid sequence according to SEQ ID NO: 15 and wherein the amino acids of the amino acid sequence according to SEQ ID NO: 15 are D-amino acids, wherein the amino acid sequence of the mutant enzymatic activity exhibiting moiety differs from the amino acid sequence of the enzymatic activity exhibiting moiety consisting of an amino acid sequence according to SEQ ID NO: 15 at least at one amino acid position, preferably at three amino acid positions, and/or wherein the amino acid sequence of the mutant enzymatic activity exhibiting moiety is a truncated form of an amino acid sequence according to SEQ ID NO: 15, and wherein the amino acid sequence of the mutant enzymatic activity exhibiting moiety is different from an amino acid sequence according to any of SEQ ID NOs 15 to 22 and 51.

[0001] The present invention is related to a method for adding one or more L-nucleotides to the 3′ end of a first L-nucleic acid, a method for amplifying a target L-nucleic acid, a protein comprising an enzymatic activity exhibiting moiety, polymerases comprising an amino acid sequence wherein the amino acid of the amino acid sequence are D-amino acids, a polymerase variant of a wild type polymerase, wherein the wild type polymerase consists of an amino acid sequence according to SEQ ID NO: 15, use of a protein comprising an enzymatic activity exhibiting moiety in a method for adding one or more L-nucleotides, use of a protein comprising an enzymatic activity exhibiting moiety in a method for amplifying a target L-nucleic acid, a method for the identification of a target molecule binding L-nucleic acid molecule, and a method for producing the protein and polymerase, respectively.

[0002] The availability of gene technology in the broader sense contributed much to the progress made over the last decades in the fields of medicine and diagnosis as well as in basic research. Synthesis power provided by gene technology is going beyond the one of chemical synthesis. Gene technology and genetic engineering in particular allow the production of factually unlimited amounts of L-peptides and L-proteins making use of the enzymatic machinery of prokaryotic and eukaryotic cells. Enzymes and polymerases in particular, either wild type forms or variants of such wild type forms, allow the synthesis of D-nucleic acids linking the building blocks of such D-nucleic acids, i.e. D-nucleotides to a length which is, at least not with a reasonable yield, achievable by chemical synthesis.

[0003] Due to chiral specificity, the enzymes used in gene technology can only make use of building blocks and substrates, respectively, the chirality of which fits to their own chirality. Buildings blocks and substrates, respectively, of opposite chirality cannot be subject to the enzymes' activity. Due to the principle of chiral reciprocity, the processing of building blocks and substrates, respectively, of opposite chirality require the enzymes to have opposite chirality, too.

[0004] This principle of chiral reciprocity is, for example, intensively used in the generation of target binding L-nucleic acids which are also known and referred to as spiegelmers. To date spiegelmers are identified by a process that uses, in a first step, a D-nucleic acid library for in vitro selection against the enantiomeric form of the target molecule or target structure such as D-peptides or D-proteins. In a second step, the thus identified D-nucleic acids binding to the enantiomeric form of the target molecule or target structure are prepared as corresponding L-nucleic acids. As a result of the principle of chiral reciprocity these L-nucleic acids, i.e. spiegelmers, are able to bind to the true or actual target molecule such as L-peptides or L-proteins and not to the enantiomeric form thereof such as D-peptides or D-proteins used for the selection process. Preferably, such true or actual target molecule or target structure is the target molecule or target structure as present in a biological system such as a human or animal body. Methods for the preparation of such spiegelmers are described, for example, in described in ‘The Aptamer Handbook’ (eds. Klussmann, 2006).

[0005] One way of making the process of identifying spiegelmers easier, could be to redesign the process such that L-nucleic acids are directly selected from a L-nucleic acid library using the target molecule or target structure in that enantiomeric form exhibited by the true or actual target molecule or target structure. As part of the process is the amplification of those L-nucleic acids initially binding to the target molecule and target structure, respectively, a polymerase adding at least one nucleotide to an L-primer would be required. To date, no polymerase consisting of L-amino acids is known which is capable of doing so. Because of this, there is a need for a polymerase and similar enzymes consisting of D-amino acids. As gene technology cannot provide such functionally active polymerase consisting of D-amino acids, chemical synthesis is required. However, the synthesis of D-proteins or D-polypeptides is limited to comparatively small molecules. The largest D-protein synthesized so far is the D-protein form of the angiogenic protein vascular endothelial growth factor (abbr. VEGF-A) consisting of 102 D-amino acids (Mandal et al., 2012), Polymerases, however, typically consist of more than 300 amino acids.

[0006] Therefore, the problem underlying the present invention is the provision of a method which allow the adding of at least one nucleotide to an L-nucleic acid such as a primer. A further problem underlying the present invention is the provision of a method for amplifying a target L-nucleic acid making use of L-nucleotides. A still further problem underlying the present invention is the provision of means which allow the practicing of such methods.

[0007] These and other problems underlying the present invention are solved by the subject matter of the attached independent claims. Preferred embodiments may be taken from the attached dependent claims.

[0008] More specifically, these and other problems underlying the present invention are also solved by the following embodiments.

### EMBODIMENT 1

[0009] A method for adding one or more L-nucleotides to the 3′end of a first L-nucleic acid, wherein the method comprises the step of reacting the one or more L-nucleotides with the first L-nucleic acid in the presence of a protein comprising a mutant enzymatic activity exhibiting moiety, wherein the enzymatic activity is capable of adding one or more L-nucleotides to the 3′ end of the first L-nucleic acid, wherein the mutant enzymatic activity exhibiting moiety comprises an amino acid sequence, wherein the amino acids of the amino acid sequence are D-amino acids, wherein the mutant enzymatic activity exhibiting moiety is a variant of an enzymatic activity exhibiting moiety, wherein the enzymatic activity exhibiting moiety consists of an amino acid sequence according to SEQ ID NO: 15 and wherein the amino acids of the amino acid sequence according to SEQ ID NO: 15 are D-amino acids, wherein the amino acid sequence of the mutant enzymatic activity exhibiting moiety differs from the amino acid sequence of the enzymatic activity exhibiting moiety consisting of an amino acid sequence according to SEQ ID NO: 15 at least at one amino acid position, preferably at three amino acid positions, and/or wherein the amino acid sequence of the mutant enzymatic activity exhibiting moiety is a truncated form of an amino acid sequence according to SEQ ID NO: 15, and wherein the amino acid sequence of the mutant enzymatic activity exhibiting moiety is different from an amino acid sequence according to any of SEQ ID NOs 15 to 22 and 51.

### EMBODIMENT 2

[0010] The method according to embodiment 1, wherein the amino acid sequence of the mutant enzymatic activity exhibiting moiety differs from the amino acid sequence of the enzymatic activity exhibiting moiety consisting of an amino acid sequence according to SEQ ID NO: 15 at the following amino acid position(s) of the amino acid sequence according to SEQ ID NO: 15 or at amino acid position(s) corresponding thereto:

a) at least one of amino acid positions 71, 76, 67, or 86, or
b) amino acid position 155 or 203 and 71; or
c) amino acid position 155 or 203 and 31; or
d) amino acid position 155 or 203 and 76; or
e) amino acid position 155 or 203 and 67; or
f) amino acid position 155 or 203 and 86; or
g) amino acid position 155 or 203 and 96, or
h) amino acid position 155 or 203 and 85, or
i) amino acid position 155 and 203 and 71, or
j) amino acid position 155 and 203 and 86, or
k) amino acid position 155 and 203 and 31, or
l) amino acid position 155 and 203 and 76, or
m) amino acid position 155 and 203 and 67, or
n) amino acid position 155 and 203 and 86, or
o) amino acid position 155 and 203 and 96, or
p) amino acid position 155 and 203 and 85,
wherein preferably in any one of a) to p) the amino acid at positions 155, 203, 71, 67, 85 and 96 are substituted by cysteine, the amino acid at position 31 is substituted by serine, the amino acid at position 76 is substituted by glycine or alanine, and the amino acid at position 86 is substituted by glycine or cysteine.

### EMBODIMENT 3

[0011] The method according to embodiment 2, wherein the mutant enzymatic activity exhibiting moiety comprises an amino acid sequence according to any one of SEQ ID NOs 89 to 120, preferably an amino acid sequence according to SEQ ID NO: 89 or an amino acid sequence according to SEQ ID NO: 90 or an amino acid sequence according to SEQ ID NO: 94 or an amino acid sequence according to SEQ ID NO: 97, more preferably an amino acid sequence according to SEQ ID NO: 94 or an amino acid sequence according to SEQ ID NO: 97, most preferably an amino acid sequence according to SEQ ID NO: 94.

### EMBODIMENT 4

[0012] The method according to embodiment 1, wherein the amino acid sequence of the mutant enzymatic activity exhibiting moiety is a truncated form of an amino acid sequence according to SEQ ID NO: 15, wherein the truncated form is lacking the n C-terminal amino acids of the amino acid sequence according to SEQ ID NO: 15, wherein n is any integer selected from the group comprising 1, 2, 3, 4, 5, 6, 7, 8, 9, 10, 11, 12, 13, 14, and 15.

### EMBODIMENT 5

[0013] The method according to any one of embodiments 1 and 4, wherein the mutant enzymatic activity exhibiting moiety comprises an amino acid sequence according to any one of SEQ ID NOs 121, 161, 201, 241 and 281.

### EMBODIMENT 6

[0014] The method according to any one of embodiments 1 and 4, wherein the mutant enzymatic activity exhibiting moiety comprises an amino acid sequence that differs from an amino acid sequence of a truncated form of an amino acid sequence according to SEQ ID NO: 15 at least at one amino acid position, preferably at three amino acid positions, wherein the truncated form of an amino acid sequence according to SEQ ID NO: 15 is an amino acid sequence according to any one of SEQ ID NOs: 121, 161, 201, 241 and 281

### EMBODIMENT 7

[0015] The method according to embodiment 6, wherein the amino acid sequence of the mutant enzymatic activity exhibiting moiety differs from the amino acid sequence of any one of SEQ ID NOs: 121, 161, 201, 241 and 281 at the following position(s) of the amino acid sequence according to any one of SEQ ID NOs: 121, 161, 201, 241 and 281 or at amino acid position(s) corresponding thereto:

a) amino acid position 155 and/or 203 and/or 71, or
b) amino acid position 155 and/or 203 and/or 86, or
c) amino acid position 155 and/or 203 and/or 31, or
d) amino acid position 155 and/or 203 and/or 76, or
e) amino acid position 155 and/or 203 and/or 67, or
f) amino acid position 155 and/or 203 and/or 86, or
g) amino acid position 155 and/or 203 and/or 96, or
h) amino acid position 155 and/or 203 and/or 85
wherein preferably in any one of a) to h) the amino acid at positions 155, 203, 71, 67, 85 and 96 are substituted by cysteine, the amino acid at position 31 is substituted by serine, the amino acid at position 76 is substituted by glycine or alanine, and the amino acid at position 86 is substituted by glycine or cysteine, wherein more preferably the amino acid sequence of the mutant enzymatic activity exhibiting moiety comprises an amino acid sequence according to any one of SEQ ID NOs: 122 to 160, 162 to 200, 202 to 240, 242 to 280, and 282 to 338, wherein most preferably the amino acid sequence of the mutant enzymatic activity exhibiting moiety comprises an amino acid sequence according to any one of SEQ ID NOs 135, 174, 214, 254, 294.

### EMBODIMENT 8

[0016] The method according to embodiment 1, wherein the mutant enzymatic activity exhibiting moiety comprises an amino acid sequence according to any one of SEQ ID NOs: 339 to 343.

### EMBODIMENT 9

[0017] The method according to embodiment 1, wherein the mutant enzymatic activity exhibiting moiety comprises an amino acid sequence that differs from a mutant form of an amino acid sequence according to SEQ ID NO: 15 at least at one amino acid position, preferably at three amino acid positions, wherein the mutant form of an amino acid sequence according to SEQ ID NO: 15 is an amino acid sequence according to any one of SEQ ID NOs: 339 to 343.

### EMBODIMENT 10

[0018] The method according to embodiment 9, wherein the amino acid sequence of the mutant enzymatic activity exhibiting moiety differs from the amino acid sequence of any one of SEQ ID NOs: 339 to 343 at the following position(s) of the amino acid sequence according to any one of SEQ ID NOs: 339 to 343, or at amino acid position(s) corresponding thereto:

a) amino acid position 155 and/or 203 and/or 71, or
b) amino acid position 155 and/or 203 and/or 86, or
c) amino acid position 155 and/or 203 and/or 31, or
d) amino acid position 155 and/or 203 and/or 76, or
e) amino acid position 155 and/or 203 and/or 67, or
f) amino acid position 155 and/or 203 and/or 86, or
g) amino acid position 155 and/or 203 and/or 96, or
h) amino acid position 155 and/or 203 and/or 85,
wherein preferably in any one of a) to h) the amino acid at positions 155, 203, 71, 67, 85 and 96 are substituted by cysteine, the amino acid at position 31 is substituted by serine, the amino acid at position 76 is substituted by glycine or alanine and the amino acid at position 86 is substituted by glycine or cysteine.

### EMBODIMENT 11

[0019] The method according to any one of embodiments 1 and 10, wherein the mutant enzymatic activity exhibiting moiety is a polymerase activity exhibiting moiety.

### EMBODIMENT 12

[0020] The method according to any one of embodiments 1 to 11, wherein the mutant enzymatic activity is a polymerase activity.

### EMBODIMENT 13

[0021] The method according to embodiment 12, wherein the polymerase activity is a thermostable polymerase activity.

### EMBODIMENT 14

[0022] The method according to any one of embodiments 12 to 13, wherein the polymerase activity is a DNA-polymerase activity.

### EMBODIMENT 15

[0023] The method according to embodiment 14, wherein the DNA-polymerase activity is a DNA-dependent DNA-polymerase activity.

### EMBODIMENT 16

[0024] The method according to any one of embodiments 1 to 15, wherein the mutant enzymatic activity exhibiting moiety is an enzyme.

### EMBODIMENT 17

[0025] The method according to any one of embodiments 11 to 16, wherein the polymerase activity exhibiting moiety is a polymerase.

### EMBODIMENT 18

[0026] The method according to any one of embodiments 1 to 17, wherein the step of reacting is carried out under conditions which allow the adding of the at least one or more L-nucleotides to the first L-nucleic acid, preferably allow the adding of 5 to 20,000 L-nucleotides, preferably 10 to 2,000 L-nucleotides, more preferably 50 to 500 L-nucleotides, most preferably 50 to 100 L-nucleotides.

### EMBODIMENT 19

[0027] The method according to any one of embodiments 1 to 18, wherein the adding of the at least one or more L-nucleotides to the first L-nucleic acid is covalent binding of the at least one or more L-nucleotides to the first L-nucleic acid, preferably by forming a 3′-5′ phosphodiester linkage between the 3′OH of the first L-nucleic acid and the 5′ phosphate of one of the at least one or more L-nucleotides.

### EMBODIMENT 20

[0028] The method according to any one of embodiments 1 to 19, wherein the first L-nucleic acid is a primer consisting of DNA, RNA, modified DNA, modified RNA or combinations thereof.

### EMBODIMENT 21

[0029] The method according to any one of embodiments 1 to 20, wherein the first L-nucleic acid consists of L-nucleotides and optionally a modification.

### EMBODIMENT 22

[0030] The method according to any one of embodiments 1 to 21, wherein the first L-nucleic acid consists of L-nucleotides.

### EMBODIMENT 23

[0031] The method according to any one of embodiments 1 to 22, wherein the reaction further comprises a second L-nucleic acid, wherein one molecule of the first L-nucleic acid is hybridized to one molecule of the second L-nucleic acid, preferably through Watson-Crick base pairing.

### EMBODIMENT 24

[0032] The method according to embodiment 23, wherein the polymerase activity exhibiting moiety synthesizes a third L-nucleic acid that is complementary to the second L-nucleic acid, wherein the third L-nucleic acid comprise the first L-nucleic acid and the L-nucleotides added to the 3′end of the first L-nucleic acid.

### EMBODIMENT 25

[0033] A method for amplifying a target L-nucleic acid in the presence of L-nucleotides and a protein comprising a mutant enzymatic activity exhibiting moiety wherein the mutant enzymatic activity exhibiting moiety is capable of amplifying the target L-nucleic acid,

wherein the mutant enzymatic activity exhibiting moiety comprises an amino acid sequence, wherein the amino acids of the amino acid sequence are D-amino acids,
wherein the mutant enzymatic activity exhibiting moiety is a variant of an enzymatic activity exhibiting moiety, wherein the enzymatic activity exhibiting moiety consists of an amino acid sequence according to SEQ ID NO: 15 and wherein the amino acids of the amino acid sequence according to SEQ ID NO: 15 are D-amino acids,
wherein the amino acid sequence of the mutant enzymatic activity exhibiting moiety differs from the amino acid sequence of the enzymatic activity exhibiting moiety consisting of an amino acid sequence according to SEQ ID NO: 15 at least at one amino acid position, preferably at three amino acid positions, and/or
wherein the amino acid sequence of the mutant enzymatic activity exhibiting moiety is a truncated form of an amino acid sequence according to SEQ ID NO: 15, and
wherein the amino acid sequence of the mutant enzymatic activity exhibiting moiety is different from an amino acid sequence according to any of SEQ ID NOs 15 to 22 and 51.

### EMBODIMENT 26

[0034] The method according to embodiment 25, wherein the amino acid sequence of the mutant enzymatic activity exhibiting moiety differs from the amino acid sequence of the enzymatic activity exhibiting moiety consisting of an amino acid sequence according to SEQ ID NO: 15 at the following amino acid position(s) of the amino acid sequence according to SEQ ID NO: 15 or at amino acid position(s) corresponding thereto:

a) at least one of amino acid positions 71, 76, 67, or 86, or
b) amino acid position 155 or 203 and 71; or
c) amino acid position 155 or 203 and 31; or
d) amino acid position 155 or 203 and 76; or
e) amino acid position 155 or 203 and 67; or
f) amino acid position 155 or 203 and 86; or
g) amino acid position 155 or 203 and 96, or
h) amino acid position 155 or 203 and 85, or
i) amino acid position 155 and 203 and 71, or
j) amino acid position 155 and 203 and 86, or
k) amino acid position 155 and 203 and 31, or
l) amino acid position 155 and 203 and 76, or
m) amino acid position 155 and 203 and 67, or
n) amino acid position 155 and 203 and 86, or
o) amino acid position 155 and 203 and 96, or
p) amino acid position 155 and 203 and 85,
wherein preferably in any one of a) to p) the amino acid at positions 155, 203, 71, 67, 85 and 96 are substituted by cysteine, the amino acid at position 31 is substituted by serine, the amino acid at position 76 is substituted by glycine or alanine, and the amino acid at position 86 is substituted by glycine or cysteine.

### EMBODIMENT 27

[0035] The method according to embodiment 26, wherein the mutant enzymatic activity exhibiting moiety comprises an amino acid sequence according to any one of SEQ ID NOs 89 to 120, preferably an amino acid sequence according to SEQ ID NO: 89 or an amino acid sequence according to SEQ ID NO: 90 or an amino acid sequence according to SEQ ID NO: 94 or an amino acid sequence according to SEQ ID NO: 97, more preferably an amino acid sequence according to SEQ ID NO: 94 or an amino acid sequence according to SEQ ID NO: 97, most preferably an amino acid sequence according to SEQ ID NO: 94.

### EMBODIMENT 28

[0036] The method according to embodiment 25, wherein the amino acid sequence of the mutant enzymatic activity exhibiting moiety is a truncated form of an amino acid sequence according to SEQ ID NO: 15, wherein the truncated form is lacking the n C-terminal amino acids of the amino acid sequence according to SEQ ID NO: 15, wherein n is any integer selected from the group comprising 1, 2, 3, 4, 5, 6, 7, 8, 9, 10, 11, 12, 13, 14, and 15.

### EMBODIMENT 29

[0037] The method according to any one of embodiments 25 and 28, wherein the mutant enzymatic activity exhibiting moiety comprises an amino acid sequence according to any one of SEQ ID NOs 121, 161, 201, 241 and 281.

### EMBODIMENT 30

[0038] The method according to any one of embodiments 25 and 28, wherein the mutant enzymatic activity exhibiting moiety comprises an amino acid sequence that differs from an amino acid sequence of a truncated form of an amino acid sequence according to SEQ ID NO: 15 at least at one amino acid position, preferably at three amino acid positions, wherein the truncated form of an amino acid sequence according to SEQ ID NO: 15 is an amino acid sequence according to any one of SEQ ID NOs: 121, 161, 201, 241 and 281.

### EMBODIMENT 31

[0039] The method according to embodiment 30, wherein the amino acid sequence of the mutant enzymatic activity exhibiting moiety differs from the amino acid sequence any one of SEQ ID NOs: 121, 161, 201, 241 and 281 at the following position(s) of the amino acid sequence according to any one of SEQ ID NOs: 121, 161, 201, 241 and 281 or at amino acid position(s) corresponding thereto:

a) amino acid position 155 and/or 203 and/or 71, or
b) amino acid position 155 and/or 203 and/or 86, or
c) amino acid position 155 and/or 203 and/or 31, or
d) amino acid position 155 and/or 203 and/or 76, or
e) amino acid position 155 and/or 203 and/or 67, or
f) amino acid position 155 and/or 203 and/or 86, or
g) amino acid position 155 and/or 203 and/or 96, or
h) amino acid position 155 and/or 203 and/or 85, wherein preferably in any one of a) to h) the amino acid at positions 155, 203, 71, 67, 85 and 96 are substituted by cysteine, the amino acid at position 31 is substituted by serine, the amino acid at position 76 is substituted by glycine or alanine and the amino acid at position 86 is substituted by glycine or cysteine,
wherein more preferably the amino acid sequence of the mutant enzymatic activity exhibiting moiety comprises an amino acid sequence according to any one of SEQ ID NOs 122 to 160, 162 to 200, 202 to 240, 242 to 280, and 282 to 338, wherein most preferably the amino acid sequence of the mutant enzymatic activity exhibiting moiety comprises an amino acid sequence according to any one of SEQ ID NOs 135, 174, 214, 254, 294.

### EMBODIMENT 32

[0040] The method according to embodiment 25, wherein the mutant enzymatic activity exhibiting moiety comprises an amino acid sequence according to any one of SEQ ID NOs 339 to 343.

### EMBODIMENT 33

[0041] The method according to embodiment 25, wherein the mutant enzymatic activity exhibiting moiety comprises an amino acid sequence that differs from a mutant form of an amino acid sequence according to SEQ ID NO: 15 at least at one amino acid position, preferably at three amino acid positions, wherein the mutant form of an amino acid sequence according to SEQ ID NO: 15 is an amino acid sequence according to any one of SEQ ID NOs: 339 to 343.

### EMBODIMENT 34

[0042] The method according to embodiment 33, wherein the amino acid sequence of the mutant enzymatic activity exhibiting moiety differs from the amino acid sequence of any one of SEQ ID NOs: 339 to 343 at the following position(s) of the amino acid sequence according to any one of SEQ ID NOs: 339 to 343, or at amino acid position(s) corresponding thereto:

a) amino acid position 155 and/or 203 and/or 71, or
b) amino acid position 155 and/or 203 and/or 86, or
c) amino acid position 155 and/or 203 and/or 31, or
d) amino acid position 155 and/or 203 and/or 76, or
e) amino acid position 155 and/or 203 and/or 67, or
f) amino acid position 155 and/or 203 and/or 86, or
g) amino acid position 155 and/or 203 and/or 96, or
h) amino acid position 155 and/or 203 and/or 85, wherein preferably in any one of a) to h) the amino acid at positions 155, 203, 71, 67, 85 and 96 are substituted by cysteine, the amino acid at position 31 is substituted by serine, the amino acid at position 76 is substituted by glycine or alanine and the amino acid at position 86 is substituted by glycine or cysteine.

### EMBODIMENT 35

[0043] The method according to any one of embodiments 25 to 34, wherein the enzymatic activity exhibiting moiety is a polymerase activity exhibiting moiety.

### EMBODIMENT 36

[0044] The method according to any one of embodiments 25 to 35, wherein the enzymatic activity is a polymerase activity.

### EMBODIMENT 37

[0045] The method according to embodiment 36, wherein the polymerase activity is a thermostable polymerase activity.

### EMBODIMENT 38

[0046] The method according to any one of embodiments 36 to 37, wherein the polymerase activity is a DNA-polymerase activity.

### EMBODIMENT 39

[0047] The method according to embodiment 38, wherein the DNA-polymerase activity is a DNA-dependent DNA-polymerase activity.

### EMBODIMENT 40

[0048] The method according to any one of embodiments 25 to 39, wherein the enzymatic activity exhibiting moiety is an enzyme.

### EMBODIMENT 41

[0049] The method according to any one of embodiments 35 to 40, wherein the polymerase activity exhibiting moiety is a polymerase.

### EMBODIMENT 42

[0050] The method according to any one of embodiments 25 to 41, wherein the step of reacting is carried out under conditions which allow the amplification of the target L-nucleic acid.

### EMBODIMENT 43

[0051] The method according to any one of embodiments 25 to 42, wherein the method makes use of at least one primer, preferably two primers, wherein the at least one primer consists of L-nucleotides and optionally a modification.

### EMBODIMENT 44

[0052] The method according to embodiment 43, wherein the primers consist of L-nucleotides.

### EMBODIMENT 45

[0053] The method according to any one of embodiment 25 to 44, wherein the target L-nucleic acid consists of L-nucleotides.

### EMBODIMENT 46

[0054] The method according to any one of embodiments 25 to 45, wherein the method is a polymerase chain reaction.

### EMBODIMENT 47

[0055] The method according to any one of embodiments 25 to 46, wherein the target L-nucleic acid consists of L-DNA.

### EMBODIMENT 48

[0056] The method according to any one of embodiments 25 to 47, wherein the target L-nucleic acid consists of 20 to 20,000 L-nucleotides, preferably 30 to 2,000 L-nucleotides, more preferably 40 to 500 L-nucleotides, most preferably 50 to 100 L-nucleotides.

### EMBODIMENT 49

[0057] A protein comprising a mutant enzymatic activity exhibiting moiety, wherein the mutant enzymatic activity exhibiting moiety comprises an amino acid sequence, wherein the amino acids of the amino acid sequence are D-amino acids, wherein the mutant enzymatic activity is capable of adding one or more L-nucleotides to the 3′ end of the first L-nucleic acid, wherein the mutant enzymatic activity exhibiting moiety is a variant of an enzymatic activity exhibiting moiety, wherein the enzymatic activity exhibiting moiety consists of an amino acid sequence according to SEQ ID NO: 15 and wherein the amino acids of the amino acid sequence according to SEQ ID NO: 15 are D-amino acids,

wherein the amino acid sequence of the mutant enzymatic activity exhibiting moiety differs from the amino acid sequence of the enzymatic activity exhibiting moiety consisting of an amino acid sequence according to SEQ ID NO: 15 at least at one amino acid position, preferably at three amino acid positions, and/or
wherein the amino acid sequence of the mutant enzymatic activity exhibiting moiety is a truncated form of an amino acid sequence according to SEQ ID NO: 15, and wherein the amino acid sequence of the mutant enzymatic activity exhibiting moiety is different from an amino acid sequence according to any of SEQ ID NOs 15 to 22 and 51.

### EMBODIMENT 50

[0058] The protein according to embodiment 49, wherein the amino acid sequence of the mutant enzymatic activity exhibiting moiety differs from the amino acid sequence of the enzymatic activity exhibiting moiety consisting of an amino acid sequence according to SEQ ID NO: 15 at the following amino acid position(s) of the amino acid sequence according to SEQ ID NO: 15 or at amino acid position(s) corresponding thereto:

a) at least one of amino acid positions 71, 76, 67, or 86, or
b) amino acid position 155 or 203 and 71; or
c) amino acid position 155 or 203 and 31; or
d) amino acid position 155 or 203 and 76; or
e) amino acid position 155 or 203 and 67; or
f) amino acid position 155 or 203 and 86; or
g) amino acid position 155 or 203 and 96, or
h) amino acid position 155 or 203 and 85, or
i) amino acid position 155 and 203 and 71, or
j) amino acid position 155 and 203 and 86, or
k) amino acid position 155 and 203 and 31, or
l) amino acid position 155 and 203 and 76, or
m) amino acid position 155 and 203 and 67, or
n) amino acid position 155 and 203 and 86, or
o) amino acid position 155 and 203 and 96, or
p) amino acid position 155 and 203 and 85,
wherein preferably in any one of a) to p) the amino acid at positions 155, 203, 71, 67, 85 and 96 are substituted by cysteine, the amino acid at position 31 is substituted by serine, the amino acid at position 76 is substituted by glycine or alanine and the amino acid at position 86 is substituted by glycine or cysteine.

### EMBODIMENT 51

[0059] The protein according to embodiment 50, wherein the mutant enzymatic activity exhibiting moiety comprises an amino acid sequence according to any one of SEQ ID NOs 89 to 120, preferably an amino acid sequence according to SEQ ID NO: 89 or an amino acid sequence according to SEQ ID NO: 90 or an amino acid sequence according to SEQ ID NO: 94 or an amino acid sequence according to SEQ ID NO: 97, more preferably an amino acid sequence according to SEQ ID NO: 94 or an amino acid sequence according to SEQ ID NO: 97, most preferably an amino acid sequence according to SEQ ID NO: 94.

### EMBODIMENT 52

[0060] The protein according to claim 49, wherein the amino acid sequence of the mutant enzymatic activity exhibiting moiety is a truncated form of an amino acid sequence according to SEQ ID NO: 15, wherein the truncated form is lacking the n C-terminal amino acids of the amino acid sequence according to SEQ ID NO: 15, wherein n is any integer selected from the group comprising 1, 2, 3, 4, 5, 6, 7, 8, 9, 10, 11, 12, 13, 14, and 15.

### EMBODIMENT 53

[0061] The protein according to any one of embodiments 49 and 52, wherein the mutant enzymatic activity exhibiting moiety comprises an amino acid sequence according to any one of SEQ ID NOs: 121, 161, 201, 241 and 281.

### EMBODIMENT 54

[0062] The protein according to any one of embodiments 49 and 52, wherein the mutant enzymatic activity exhibiting moiety comprises an amino acid sequence that differs from an amino acid sequence of a truncated form of an amino acid sequence according to SEQ ID NO: 15 at least at one amino acid position, preferably at three amino acid positions,

wherein the truncated form of an amino acid sequence according to SEQ ID NO: 15 is an amino acid sequence according to any one of SEQ ID NOs: 121, 161, 201, 241 and 281.

### EMBODIMENT 55

[0063] The protein according to embodiment 54, wherein the amino acid sequence of the mutant enzymatic activity exhibiting moiety differs from the amino acid sequence of any one of SEQ ID NOs: 121, 161, 201, 241 and 281 at the following position(s) of the amino acid sequence according to any one of SEQ ID NOs: 121, 161, 201, 241 and 281 or at amino acid position(s) corresponding thereto:

a) amino acid position 155 and/or 203 and/or 71, or
b) amino acid position 155 and/or 203 and/or 86, or
c) amino acid position 155 and/or 203 and/or 31, or
d) amino acid position 155 and/or 203 and/or 76, or
e) amino acid position 155 and/or 203 and/or 67, or
f) amino acid position 155 and/or 203 and/or 86, or
g) amino acid position 155 and/or 203 and/or 96, or
h) amino acid position 155 and/or 203 and/or 85,
wherein preferably in any one of a) to h) the amino acid at positions 155, 203, 71, 67, 85 and 96 are substituted by cysteine, the amino acid at position 31 is substituted by serine, the amino acid at position 76 is substituted by glycine or alanine and the amino acid at position 86 is substituted by glycine or cysteine,
wherein more preferably the amino acid sequence of the protein comprises an amino acid sequence according to any one of SEQ ID NOs 122 to 160, 162 to 200, 202 to 240, 242 to 280, and 282 to 338, wherein most preferably the amino acid sequence of the mutant enzymatic activity exhibiting moiety comprises an amino acid sequence according to any one of SEQ ID NOs 135, 174, 214, 254, 294.

### EMBODIMENT 56

[0064] The protein according to embodiment 49, wherein the mutant enzymatic activity exhibiting moiety comprises an amino acid sequence according to any one of SEQ ID NOs 339 to 343.

### EMBODIMENT 57

[0065] The protein according to embodiment 49, wherein the mutant enzymatic activity exhibiting moiety comprises an amino acid sequence that differs from a mutant form of an amino acid sequence according to SEQ ID NO: 15 at least at one amino acid position, preferably at three amino acid positions, wherein the mutant form of an amino acid sequence according to SEQ ID NO: 15 is an amino acid sequence according to any one of SEQ ID NOs: 339 to 343.

### EMBODIMENT 58

[0066] The protein according to embodiment 57, wherein the amino acid sequence of the mutant enzymatic activity exhibiting moiety differs from the amino acid sequence of any one of SEQ ID NOs: 339 to 343 at the following position(s) of the amino acid sequence according to any one of SEQ ID NOs: 339 to 343, or at amino acid position(s) corresponding thereto:

a) amino acid position 155 and/or 203 and/or 71, or
b) amino acid position 155 and/or 203 and/or 86, or
c) amino acid position 155 and/or 203 and/or 31, or
d) amino acid position 155 and/or 203 and/or 76, or
e) amino acid position 155 and/or 203 and/or 67, or
f) amino acid position 155 and/or 203 and/or 86, or
g) amino acid position 155 and/or 203 and/or 96, or
h) amino acid position 155 and/or 203 and/or 85,
wherein preferably in any one of a) to h) the amino acid at positions 155, 203, 71, 67, 85 and 96 are substituted by cysteine, the amino acid at position 31 is substituted by serine, the amino acid at position 76 is substituted by glycine or alanine and the amino acid at position 86 is substituted by glycine or cysteine.

### EMBODIMENT 59

[0067] The protein according to any of embodiments 49 to 58, wherein the mutant enzymatic activity exhibiting moiety is a polymerase activity exhibiting moiety.

### EMBODIMENT 60

[0068] The protein according to embodiment 49 to 59, wherein the mutant enzymatic activity is a polymerase activity.

### EMBODIMENT 61

[0069] The protein according to embodiment 60, wherein the polymerase activity is a thermostable polymerase activity.

### EMBODIMENT 62

[0070] The protein according to any one of embodiments 60 to 61, wherein the polymerase activity is a DNA-polymerase activity.

### EMBODIMENT 63

[0071] The protein according to embodiment 62, wherein the DNA-polymerase activity is a DNA-dependent DNA-polymerase activity.

### EMBODIMENT 64

[0072] The protein according to any one of embodiments 49 to 63, wherein the mutant enzymatic activity exhibiting moiety is an enzyme.

### EMBODIMENT 65

[0073] The protein according to any one of embodiments 59 to 63, wherein the polymerase activity exhibiting moiety is a polymerase.

### EMBODIMENT 66

[0074] A polymerase variant of a wild type polymerase,

wherein the polymerase variant comprises an amino acid sequence, preferably the amino acids of the amino acid sequence are D-amino acids,
wherein the wild type polymerase consists of an amino acid sequence according to SEQ ID NO: 15, preferably the amino acids of the amino acid sequence according to SEQ ID NO: 15 are D-amino acids,
wherein the amino acid sequence of the polymerase variant differs from the amino acid sequence of the wild type polymerase at least at one amino acid position, preferably at three amino acid positions, and/or
wherein the amino acid sequence of the polymerase variant is a truncated form of an amino acid sequence according to SEQ ID NO: 15, and
wherein the amino acid sequence of the polymerase variant is different from an amino acid sequence according to any of SEQ ID NOs 15 to 22 and 51.

### EMBODIMENT 67

[0075] The polymerase variant according to embodiment 66, wherein the amino acid sequence of the polymerase variant differs from the amino acid sequence of the wild type polymerase consisting of an amino acid sequence according to SEQ ID NO: 15 at the following amino acid position(s) of the amino acid sequence according to SEQ ID NO: 15 or at amino acid position(s) corresponding thereto:

a) at least one of amino acid positions 71, 76, 67, or 86, or
b) amino acid position 155 or 203 and 71; or
c) amino acid position 155 or 203 and 31; or
d) amino acid position 155 or 203 and 76; or
e) amino acid position 155 or 203 and 67; or
f) amino acid position 155 or 203 and 86; or
g) amino acid position 155 or 203 and 96, or
h) amino acid position 155 or 203 and 85, or
i) amino acid position 155 and 203 and 71, or
j) amino acid position 155 and 203 and 86, or
k) amino acid position 155 and 203 and 31, or
l) amino acid position 155 and 203 and 76, or
m) amino acid position 155 and 203 and 67, or
n) amino acid position 155 and 203 and 86, or
o) amino acid position 155 and 203 and 96, or
p) amino acid position 155 and 203 and 85,
wherein preferably in any one of a) to p) the amino acid at positions 155, 203, 71, 67, 85 and 96 are substituted by cysteine, the amino acid at position 31 is substituted by serine, the amino acid at position 76 is substituted by glycine or alanine and the amino acid at position 86 is substituted by glycine or cysteine.

### EMBODIMENT 68

[0076] The polymerase variant according to embodiment 67, wherein the polymerase variant comprises an amino acid sequence according to any one of SEQ ID NOs 89 to 120, preferably an amino acid sequence according to SEQ ID NO: 89 or an amino acid sequence according to SEQ ID NO: 90 or an amino acid sequence according to SEQ ID NO: 94 or an amino acid sequence according to SEQ ID NO: 97, more preferably an amino acid sequence according to SEQ ID NO: 94 or an amino acid sequence according to SEQ ID NO: 97, most preferably an amino acid sequence according to SEQ ID NO: 94.

### EMBODIMENT 69

[0077] The polymerase variant according to embodiment 66, wherein the amino acid sequence of the polymerase variant is a truncated form of an amino acid sequence according to SEQ ID NO: 15, wherein the truncated form is lacking the n C-terminal amino acids of the amino acid sequence according to SEQ ID NO: 15, wherein n is any integer selected from the group comprising 1, 2, 3, 4, 5, 6, 7, 8, 9, 10, 11, 12, 13, 14, and 15

### EMBODIMENT 70

[0078] The polymerase variant according to any one of embodiments 66 and 69, wherein the polymerase variant comprises an amino acid sequence according to any one of SEQ ID NOs 121, 161, 201, 241 and 281.

### EMBODIMENT 71

[0079] The polymerase variant according to any one of embodiments 66 and 69, wherein the polymerase variant comprises an amino acid sequence that differs from an amino acid sequence of a truncated form of an amino acid sequence according to SEQ ID NO: 15 at least at one amino acid position, preferably at three amino acid positions, wherein the truncated form of an amino acid sequence according to SEQ ID NO: 15 is an amino acid sequence according to any one of SEQ ID NOs: 121, 161, 201, 241 and 281.

### EMBODIMENT 72

[0080] The polymerase variant according to embodiment 71, wherein the amino acid sequence of the polymerase variant differs from the amino acid sequence any one of SEQ ID NOs: 121, 161, 201, 241 and 281 at the following position(s) of the amino acid sequence according to any one of SEQ ID NOs: 121, 161, 201, 241 and 281 or at amino acid position(s) corresponding thereto:

a) amino acid position 155 and/or 203 and/or 71, or
b) amino acid position 155 and/or 203 and/or 86, or
c) amino acid position 155 and/or 203 and/or 31, or
d) amino acid position 155 and/or 203 and/or 76, or
e) amino acid position 155 and/or 203 and/or 67, or
f) amino acid position 155 and/or 203 and/or 86, or
g) amino acid position 155 and/or 203 and/or 96, or
h) amino acid position 155 and/or 203 and/or 85,
wherein preferably in any one of a) to h) the amino acid at positions 155, 203, 71, 67, 85 and 96 are substituted by cysteine, the amino acid at position 31 is substituted by serine, the amino acid at position 76 is substituted by glycine or alanine and the amino acid at position 86 is substituted by glycine or cysteine,
wherein more preferably the amino acid sequence of the polymerase variant comprises an amino acid sequence according to any one of SEQ ID NOs 122 to 160, 162 to 200, 202 to 240, 242 to 280, and 282 to 338, wherein most preferably the amino acid sequence of the polymerase variant comprises an amino acid sequence according to any one of SEQ ID NOs 135, 174, 214, 254, 294.

### EMBODIMENT 73

[0081] The polymerase variant according to embodiment 66, wherein the polymerase variant comprises an amino acid sequence according to any one of SEQ ID NOs 339 to 343.

### EMBODIMENT 74

[0082] The polymerase variant according to embodiment 66, wherein the polymerase variant comprises an amino acid sequence that differs from a mutant form of an amino acid sequence according to SEQ ID NO: 15 at least at one amino acid position, preferably at three amino acid positions, wherein the mutant form of an amino acid sequence according to SEQ ID NO: 15 is an amino acid sequence according to any one of SEQ ID NOs: 339 to 343.

### EMBODIMENT 75

[0083] The polymerase variant according to embodiment 74, wherein the amino acid sequence of the polymerase variant differs from the amino acid sequence of any one of SEQ ID NOs: 339 to 343 at the following position(s) of the amino acid sequence according to any one of SEQ ID NOs: 339 to 343, or at amino acid position(s) corresponding thereto:

a) amino acid position 155 and/or 203 and/or 71, or
b) amino acid position 155 and/or 203 and/or 86, or
c) amino acid position 155 and/or 203 and/or 31, or
d) amino acid position 155 and/or 203 and/or 76, or
e) amino acid position 155 and/or 203 and/or 67, or
f) amino acid position 155 and/or 203 and/or 86, or
g) amino acid position 155 and/or 203 and/or 96, or
h) amino acid position 155 and/or 203 and/or 85,
wherein preferably in any one of a) to h) the amino acid at positions 155, 203, 71, 67, 85 and 96 are substituted by cysteine, the amino acid at position 31 is substituted by serine, the amino acid at position 76 is substituted by glycine or alanine and the amino acid at position 86 is substituted by glycine or cysteine.

### EMBODIMENT 76

[0084] The polymerase variant according to any one of embodiments 66 to 75, wherein the amino acids of the amino acid sequence of the polymerase variant are D-amino acids.

### EMBODIMENT 77

[0085] The polymerase variant according to any one of embodiments 66 to 75, wherein the amino acids of the amino acid sequence of the polymerase variant are L-amino acids.

### EMBODIMENT 78

[0086] Use of a protein comprising a mutant enzymatic activity exhibiting in a method for adding one or more L-nucleotides to the 3′end of an L-nucleic acid, wherein the protein is a protein according to any one of embodiments 49 to 65.

### EMBODIMENT 79

[0087] Use of a protein comprising a mutant enzymatic activity exhibiting moiety in a method for amplifying a target L-nucleic acid in the presence of L-nucleotides, wherein the protein is a protein according to any one of embodiments 49 to 65.

### EMBODIMENT 80

[0088] Use according to embodiment 79, wherein the method for amplifying a target L-nucleic acid is a polymerase chain reaction.

### EMBODIMENT 81

[0089] A method for the identification of a target molecule binding L-nucleic acid molecule comprising the following steps of

[0090] (a) generating a heterogeneous population of L-nucleic acid molecules;

[0091] (b) contacting the heterogeneous population of L-nucleic acid molecules of step (a) with the target molecule;

[0092] (c) separating the L-nucleic acid molecules which are not bound by the target molecule; and

[0093] (d) amplifying the L-nucleic acid molecules which are bound by the target molecule, wherein the step of amplification uses a protein, wherein the protein is a protein according to any one of embodiments 49 to 65.

### EMBODIMENT 82

[0094] The method according to embodiment 81, further comprising the step of

[0095] (e) sequencing the L-nucleic acid molecules which are bound by the target molecule; and

[0096] (f) synthesizing nucleic acid molecules the nucleotide sequence of which is identical to the nucleotide sequence of the L-nucleic acid molecules sequenced in step (e).

### EMBODIMENT 83

[0097] The method according to any one of embodiments 81 to 82, wherein the nucleic acid molecules of the heterogeneous population of L-nucleic acid molecules of step (a) comprise at their 5′ end and their 3′ end a primer binding site and, respectively, a sequence which is complementary to a primer binding site which allow amplification of the L-nucleic acid molecules obtained in step (d) by a polymerase chain reaction, wherein the polymerase used in the polymerase chain reaction is a protein according to any one of embodiments 49 to 65, the primers used in the polymerase chain reaction consist of L-nucleotides, and the nucleotides used in the polymerase chain reaction are L-nucleotides.

### EMBODIMENT 84

[0098] The method according to any one of embodiments 81 to 83, wherein after step (d) the following step is introduced:

[0099] (da) contacting the amplified nucleic acid molecules with the target molecule, wherein

step (b) and optionally steps (c) and/or (d) are carried out prior to step (e), wherein steps (da), (b), (c) and optionally (d) are carried out in this order one or several times.

### EMBODIMENT 85

[0100] The method according to any one of embodiments 81 to 84, wherein the target molecule binding L-nucleic acid is a DNA.

### EMBODIMENT 86

[0101] The method according to any one of embodiments 81 to 85, wherein the target molecule binding L-nucleic acid molecule consists of L-nucleotides.

### EMBODIMENT 87

[0102] A method for producing a protein, wherein the protein consists of an amino acid sequence, wherein the amino acids of the amino acid sequence are D-amino acids, wherein

[0103] a) two or more fragments of the protein are chemically synthesized, whereby the fragments in their entirety form the amino acid sequence of the protein, preferably the fragments are synthesized by solid phase peptide synthesis, and

[0104] b) the fragments of step a) are ligated to each other by segment condensation, native chemical ligation, enzymatic ligation or combinations thereof,

wherein the protein is protein according to any one of embodiments 49 to 65.

### EMBODIMENT 88

[0105] The method for producing a protein according to embodiment 87, wherein the enzyme that is used in enzymatic ligation is Clostripain.

[0106] The present inventors have surprisingly found that it is possible to chemically synthesize proteins consisting of D-amino acids which are functionally active, whereby such proteins have a size as typically displayed by a polymerase. More specifically, the present inventors have perceived a method which allows the synthesis of such D-proteins and of D-polymerases, i.e. polymerases consisting of D-amino acids, which are active as polymerases. Based on this surprising finding, the proteins and enzymatic activities required for the enzymatic synthesis of L-nucleic acids and L-nucleic acid molecules are now available. Such enzymatic synthesis of L-nucleic acids and L-nucleic acid molecules comprises, but is not limited to, a method for adding one or more L-nucleotides to the 3′end of a first L-nucleic acid and a method for amplifying a target L-nucleic acid in the presence of L-nucleotides as an L-nucleic acid, i.e. the amplification product is an L-nucleic acid.

[0107] As these methods and enzymatic activities are part of an alternative process of identifying spiegelmers making use of, such alternative process of identifying spiegelmers can now be put into practice.

[0108] The present inventors have developed a method for adding one or more L-nucleotides to the 3′end of a first L-nucleic acid, wherein the method comprises the step of reacting the one or more L-nucleotides with the first L-nucleic acid in the presence of a protein comprising an enzymatic activity exhibiting moiety, wherein the enzymatic activity is capable of adding one or more L-nucleotides to the 3′ end of the first L-nucleic acid.

[0109] In a preferred embodiment enzymatic activity is capable of adding of 5 to 20,000 L-nucleotides to the 3′ end of the first L-nucleic acid, preferably 10 to 2,000 L-nucleotides, more preferably 50 to 500 L-nucleotides, most preferably 50 to 100 L-nucleotides.

[0110] The term adding as preferably used herein is covalent binding between to molecules, according the present invention the covalent binding of an L-nucleic acid and of the at least one or more L-nucleotides to the L-nucleic acid, preferably by forming a 3′-5′ phosphodiester linkage between the 3′OH of the first L-nucleic acid and the 5′ phosphate of one of the at least one or more L-nucleotides. According to the present invention the L-nucleotide added to the L-nucleic acid forms the 3′ end of the L-nucleic acid prolonged by said L-nucleotide.

[0111] In a preferred embodiment the method for adding one or more L-nucleotides to the 3′end of a first L-nucleic acid, comprises a second L-nucleic acid, wherein one molecule of the first L-nucleic acid is hybridized to one molecule of the second L-nucleic acid, preferably through Watson-Crick base pairing. In a more preferred embodiment the method allows the synthesize of a third L-nucleic acid that is complementary to the second L-nucleic acid, wherein the third L-nucleic acid comprise the first L-nucleic acid and the L-nucleotides added to the 3′end of the first L-nucleic acid, i.e. to the first L-nucleic acid one or more L-nucleotides are added to 3′end of a first L-nucleic acid resulting in the third L-nucleic acid.

[0112] The protein comprising an enzymatic activity exhibiting moiety according to the present invention comprises proteins that soley have an enzymatic activity exhibiting moiety and proteins that have an enzymatic activity exhibiting moiety and other residues or parts, wherein other residues or parts of the protein have no enzymatic activity. According to the present invention the amino acid sequence of the enzymatic activity exhibiting moiety comprises between 300 and 900 amino acids, preferably 300 and 600 amino acids, more preferably between 300 and 360 amino acids, most preferably 340 to 360 amino acids.

[0113] The protein comprising an enzymatic activity exhibiting moiety according to the present invention is preferably a polymerase activity exhibiting moiety. The protein comprising a polymerase activity exhibiting moiety according to the present invention comprises polymerases that soley have a polymerase activity exhibiting moiety and polymerases that have an polymerase activity exhibiting moiety and other residues or parts, wherein other residues or parts of the polymerase have no polymerase activity. According to the present invention the amino acid sequence of the polymerase activity exhibiting moiety comprises between 300 and 900 amino acids, preferably 300 and 600 amino acids, more preferably between 300 and 360 amino acids, most preferably 340 to 360 amino acids.

[0114] The polymerase activity exhibiting moiety according to the present invention is preferably a thermostable polymerase activity exhibiting moiety, more preferably a thermostable DNA polymerase activity exhibiting moiety and most preferably a thermostable DNA-dependant DNA-polymerase activity exhibiting moiety.

[0115] The polymerase activity exhibiting moiety according to the present invention is preferably a DNA-polymerase activity exhibiting moiety, more preferably a DNA-dependant DNA-polymerase activity exhibiting moiety or a thermostable DNA-polymerase activity exhibiting moiety, most preferably a thermostable DNA-dependant DNA-polymerase activity exhibiting moiety.

[0116] The term enzymatic activity as used herein is catalyzation of a specific reaction, preferably adding one or more nucleotides to the 3′end of an nucleic acid, amplication of an nucleic acid and/or a polymerase activity, more preferably adding one or more L-nucleotides to the 3′end of an L-nucleic acid and amplication of an L-nucleic acid.

[0117] The term polymerase activity according to the present invention is capability of an enzyme the polymerisation of L-nucleotides and/or polymerisation of L-nucleotides to an L-nucleic acid, wherein preferably the L-nucleotides are L-nucleoside triphosphates.

[0118] The polymerase activity according to the present invention is preferably a thermostable polymerase activity, more preferably a thermostable DNA polymerase activity and most preferably a thermostable DNA-dependant DNA-polymerase activity.

[0119] The polymerase activity according to the present invention is preferably a DNA-polymerase activity, more preferably a DNA-dependant DNA-polymerase or a thermostable DNA-polymerase activity, most preferably a thermostable DNA-dependant DNA-polymerase activity.

[0120] Known polymerases are from natural sources or are optimized or mutated variants of polymerases from natural sources. The polymerases consist of chiral building blocks, i.e. L-amino acids. Consequently, the structure of polymerases is inherently chiral as well, resulting in stereospecific substrate recognition. Hence, these enzymes only accept substrate molecules in the adequate, i.e. corresponding chiral configuration. Therefore known polymerases polymerize D-nucleotides or D-nucleoside triphosphates, wherein they use as a template strand a D-nucleic acid consisting of D-nucleotides to synthesize a complementary D-nucleic acid strand consisting of D-nucleotides. Additionally to the template strand the polymerase optionally use a primer that is hybridized to the template strand and consists of D-nucleotides. Since naturally occurring nucleic acids are composed of D-nucleotides and can be processed, e.g. amplified, by proteins and enzymes in particular consisting of L-amino acids, an L-nucleic acid is not recognized by such proteins and enzymes, respectively, consisting of L-amino acids. Accordingly, L-nucleic acids that bind to a target molecule or target structure, also referred to as spiegelmers, cannot be directly obtained by an in vitro selection process using the naturally occurring from of such target molecule or target structure.

[0121] The present inventors have surprisingly found that it is possible to produce a polymerase that can add an L-nucleic acid nucleotide to a primer consisting of L-nucleotides that is hybridized to an L-nucleic acid template strand. Moreover, the present inventors have surprisingly found that is possible to produce a polymerase that can be used for the amplification of an L-nucleic acid, preferably in a process that is known as polymerase-chain-reaction (abbr. PCR).

[0122] A polymerase is an enzyme that polymerizes nucleoside triphosphates. A polymerase uses a template nucleic acid strand to synthesize a nucleic acid strand which is complementary to the template nucleic acid strand. In addition to the template nucleic acid strand, the polymerase optionally uses a primer that is hybridized based on base complementarity to the template nucleic acid strand. The template nucleic acid strand, the primer and the nucleic acid strand synthesized by the polymerase can independently be either DNA or RNA. A polymerase as preferably used herein includes a DNA polymerase and an RNA-polymerase, preferably a DNA-dependent DNA polymerase, an RNA-dependent DNA polymerase such as a reverse transcriptase, an RNA-dependent RNA polymerase and an RNA-dependent DNA polymerase. More preferably, the polymerase is a thermostable polymerase. A polymerase does not need not to contain all of the amino acids found in a corresponding native or wild type enzyme, but only those which are sufficient to allow the polymerase to carry out a desired catalytic activity. In an embodiment a polymerase activity is catalytic activity which is selected from the group comprising Catalytic activities include, for example, 5′-3′ polymerization, 5′-3′ exonuclease, and 3′-5′ exonuclease activities.

[0123] The polymerases according to the present invention consist of D-amino acids and polymerize L-nucleotides or L-nucleoside triphosphates, wherein the polymerases according to the present invention use as a template strand an L-nucleic acid consisting of L-nucleotides to synthesize a complementary L-nucleic acid strand consisting of L-nucleotides. Additionally to the template strand the polymerases according to the present invention optionally use a primer that is hybridized to the template strand and consists of L-nucleotides. The template strand, the primer and synthesized nucleic acid strand can independently be either L-DNA or L-RNA. The polymerases according to the present invention include DNA polymerases consisting of D-amino acids and RNA-polymerases consisting of D-amino acids, preferably DNA-dependent DNA polymerases consisting of D-amino acids, RNA-dependent DNA polymerases such reverse transcriptases consisting of D-amino acids, RNA-dependent RNA polymerases consisting of D-amino acids and RNA-dependent DNA polymerases consisting of D-amino acids. More preferably the polymerase according to the present invention is a thermostable polymerase consisting of D-amino acids. A polymerase according to the present invention need not contain all of the amino acids found in a native enzyme, but only those which are sufficient to allow the polymerases according to the present invention to carry out a desired catalytic activity. Catalytic activities include, for example, 5′-3′ polymerization, 5′-3′ exonuclease, and 3′-5′ exonuclease activities.

[0124] A polymerase solely consisting of L-amino acids is preferably referred herein as ‘all-L polymerase.’

[0125] A polymerase solely consisting of D-amino acids is preferably referred herein as ‘all-D polymerase.’

[0126] In a preferred embodiment the polymerase according to the present invention is selected from the group of African Swine Fever Virus Polymerase X, Thermus thermophilus polymerase X core domain, rat Polymerase beta, eukaryotic Polymerase beta, Klenow Fragment, Klenow exo-polymerase, T4 DNA polymerase, Phi29 DNA polymerase, Sequenase, T7 DNA polymerase, SP6 Polymerase, DNA polymerase I, polymerase lambda, polymerase DPO4, preferably from Sulfolobus solfataricus, Sulfolobus islandicus, Sulfolobus shibatae, Sulfolobus tengchongensis, Sulfolobus tokodaii, Sulfolobus acidocaldarius, Thermococcus litoralis DNA polymerase, Pyrococcus sp. DNA polymerase, Pyrococcus furiosus DNA polymerase, Pfuturbo™ polymerase, Sulfolobus solfataricus DNA polymerase, Thermococcus gorgonarius DNA polymerase, KOD polymerase, Taq polymerase, Tth polymerase, Pyrobest polymerase, Pwo polymerase, Sac polymerase, Bst polymerase, Poc polymerase, Pab polymerase, Mth polymerase, Pho polymerase, ES4 polymerase, EX-Taq™ polymerase, LA-Tae™ polymerase, Expand™ polymerase, Platinum™ Taqpolymerases, Hi-Fi™ polymerase, Tbr polymerase, Tfl polymerase, Tru polymerase, Tac polymerase, Tne polymerase, Tma polymerase, Tih polymerase, Tfi polymerase, AmpliTae™, Stoffel Fragment, 9° Nm™ DNA Polymerase, Therminator™, Therminator II™, Phusion High Fidelity™ Polymerase, Pag5000™, Pfx-50™, Proofstart™, FideliTae™, Elongase™, and variants of each and any thereof.

[0127] In a more preferred embodiment the polymerase according to the present invention is the African Swine Fever Virus Polymerase X consisting of the amino acid sequence according to SEQ ID NO: 1. In another more preferred embodiment the polymerase according to the present invention is a variant of the African Swine Fever Virus Polymerase X, most preferably a variant of the African Swine Fever Virus Polymerase X of an amino acid sequence selected of an amino acid sequence selected from the group consisting of amino acid sequence according to SEQ ID NO: 2, amino acid sequence according to SEQ ID NO: 3 and amino acid sequence according to SEQ ID NO: 4.

[0128] In a more preferred embodiment the polymerase according to the present invention is a variant or mutant or mutant form or truncated form of the polymerase Dpo4, wherein the polymerase Dpo4 consists of the amino acid sequence according to SEQ ID NO: 15, and the variants or mutants or mutant form or truncated form of the polymerase Dpo4 comprise amino acid sequences according to any of SEQ ID NOs 89 to 343, wherein preferably the amino acids of the polymerase Dpo4 according to SEQ ID NO 15 and the amino acids of the variants or mutants or mutant form or truncated form of the polymerase Dpo4 according to any of SEQ ID NOs 89 to 343 are D-amino acids. In another more preferred embodiment the polymerase according to the present invention is a variant of the polymerase Dpo4, most preferably a variant of the polymerase Dpo4 consisting of an amino acid sequence selected of an amino acid sequence selected from the group consisting of amino acid sequence according to SEQ ID NO: 16, amino acid sequence according to SEQ ID NO: 17, amino acid sequence according to SEQ ID NO: 18, amino acid sequence according to SEQ ID NO: 19, amino acid sequence according to SEQ ID NO: 20, amino acid sequence according to SEQ ID NO: 21 and amino acid sequence according to SEQ ID NO: 22.

[0129] A variant or a mutant or mutant form or truncated form of a polymerase is a polymerase that differs from the amino acid sequence of the polymerase at one or more amino acid positions. The position of an amino acid in the amino acid sequence is preferably determined by its position to the N-terminus and the C-terminus of the polymerase and/or its position in respect to amino acids surrounding the amino acid, so that

a) if the polymerase is truncated at the N-terminus the position of the amino acid is determined by its position to the C-terminus of the polymerase and in respect to amino acids surrounding the amino acid,
b) if the polymerase is truncated at the C-terminus the position of the amino acid is determined by its position to the N-terminus of the polymerase and in respect to amino acids surrounding the amino acid, and
b) if the polymerase is truncated at the N-terminus and the C-terminus the position of the amino acid is determined by its position in respect to amino acids surrounding the amino acid.

[0130] In an embodiment of the present invention the mutant enzymatic activity exhibiting moiety is a variant or a mutant or mutant form or truncated form of an enzymatic activity exhibiting moiety, wherein the enzymatic activity exhibiting moiety consists of an amino acid sequence according to SEQ ID NO: 15, wherein preferably the amino acids of enzymatic activity exhibiting moiety according to SEQ ID NO: 15 are D-amino acids, wherein the mutant enzymatic activity exhibiting moiety is mutated as disclosed herein, i.e. at least at one amino acid position of SEQ ID NO: 15, preferably at three amino acid positions of SEQ ID NO: 15.

[0131] Preferably, the mutant enzymatic activity exhibiting moiety comprises an amino acid sequence according to any one of SEQ ID NOs: 89 to 343, wherein more preferably the amino acids of the amino acid sequence according to any one of SEQ ID NOS. 89 to 343 are D-amino acids.

[0132] In a further embodiment of the present invention the mutant enzymatic activity exhibiting moiety is mutated as disclosed herein, i.e. the amino acid sequence of the mutant enzymatic activity exhibiting moiety is, compared to the amino acid sequence according to SEQ ID NO: 15, mutated at least at one amino acid position of SEQ ID NO: 15, preferably at three amino acid positions of SEQ ID NO: 15; in other words, the mutation(s) characteristic of the mutant enzymatic activity exhibiting moiety reside(s) in the stretch of the amino acid sequence of the mutant enzymatic activity exhibiting moiety which, except said mutation(s), is the amino acid sequence according to SEQ ID NO: 15 and thus in the amino acid sequence which is contained in both the mutant enzymatic activity exhibiting moiety and the enzymatic activity exhibiting moiety. In connection with such embodiment, the mutant enzymatic activity exhibiting moiety may comprise one or more additional amino acids which is/are attached to either or both of the N-terminus and the C-terminus of the amino acid sequence according to SEQ ID NO: 15.

[0133] A polymerases according to the present invention that is thermostable is relatively unaffected by elevated temperatures. In one specific, non-limiting example, a polymerase with of thermostability is unaffected by a temperature of at least 50° C., for example, 50° C., 60° C., 75° C., 80° C., 82° C., 85° C., 88° C., 90° C., 92° C., 95° C., or even higher temperatures.

[0134] Within the process of polymerisation of L-nucleoside triphosphates the polymerase adds one nucleoside triphosphate to another nucleoside triphosphate, preferably resulting in an oligonucleotide, also referred to as a nucleic acid. In a preferred embodiment the polymerase adds only one nucleoside triphosphate to one nucleoside triphosphate or to the terminal nucleotide of a nucleic acid, e.g. if the nucleotide is chain terminator nucleotides such as a dideoxynucleotide. Such chain terminator nucleotides are used for sequencing nucleic acids and known by skilled in the art.

[0135] The process of polymerisation of L-nucleoside triphosphates can be used for amplifying an L-nucleic acid, preferably a target L-nucleic acid.

[0136] Amplification is any process that increases the number of copies of a nucleic acid, preferably a target L-nucleic acid.

[0137] In a preferred embodiment the target L-nucleic acid consists of 20 to 20,000 L-nucleotides, preferably 30 to 2,000 L-nucleotides, more preferably 40 to 500 L-nucleotides, most preferably 50 to 100 L-nucleotides.

[0138] An example of amplification is in which a nucleic acid is contacted with a pair of primers, under conditions that allow for the hybridization of the primers to nucleic acid template. The primers are extended by the polymerase by adding one or more nucleoside triphosphates to the primer under suitable conditions, dissociated from the nucleic acid template, and then re-annealed, extended, and dissociated to amplify the number of copies of the nucleic acid molec. The product of in vitro amplification can be characterized by electrophoresis, restriction endonuclease cleavage patterns, oligonucleotide hybridization or ligation, and/or nucleic acid sequencing, using standard techniques.

[0139] Alternative in vitro amplification techniques are known by a person skilled in the art including transcription-free isothermal amplification, strand displacement amplification, and NASBA™ RNA transcription-free amplification.

[0140] Some of the amplifications method relies on thermal cycling, consisting of cycles of repeated heating and cooling of the reaction for melting of a nucleic acid, preferably a double-stranded nucleic acid, and enzymatic replication of the nucleic acid. These thermal cycling steps are necessary first to physically separate the two strands in of double stranded nucleic acid at a high temperature in a process called nucleic acid melting. At a lower temperature, each strand is then used as the template in nucleic acid synthesis by the polymerase to selectively amplify the target nucleic acid. Primers containing sequences complementary to the target region along with a polymerase (after which the method is named) are key components to enable selective and repeated amplification. As the amplification method based in thermal cycling progresses, the nucleic acid generated is itself used as a template for replication, setting in motion a chain reaction in which the nucleic acid template is exponentially amplified.

[0141] The most prominent amplification method by thermal amplification is the polymerase chain reaction (abbr. PCR).

[0142] Primers are short nucleic acid molecules consisting of DNA or RNA or combinations thereof, preferably DNA oligonucleotides 10 nucleotides or more in length. More preferably, longer primers can be about 15, 20, or 25 nucleotides or more in length. Primers can be annealed to a complementary target nucleic acid strand by nucleic acid hybridization to form a hybrid between the primer and the target nucleic acid strand, and then the primer extended along the target nucleic acid strand by a polymerase Primer pairs can be used for amplification of a nucleic acid, e.g., by the PCR or other nucleic-acid amplification methods known in the art.

[0143] The use the polymerase of the present invention consisting of D-amino acids makes is necessary that the primer and the complementary target nucleic acid strand consist of L-nucleotides. Preferably at least one primer consists of L-nucleotides and optionally a modification.

[0144] Methods for preparing and using nucleic acid primers and probes are described, for example, in Sambrook et al. (Sambrock et al., 1989). PCR primer pairs can be derived from a known sequence, for example, by using computer programs intended for that purpose such as Primer. One of ordinary skill in the art will appreciate that the specificity of a particular probe or primer increases with its length.

[0145] The polymerases according to the present invention consist of D-amino acids, preferably solely consist of D-amino acids. Because of that the polymerases according to the present invention consisting of D-amino acids can not be isolated from natural sources and can not be produced by recombinant expression using bacteria, yeast, fungi, viruses or animal cells and has to be produced by a chemical process, preferably such as solid-phase peptide synthesis (abbr. SPPS) in combination with ligation methods.

[0146] Solid-phase peptide synthesis is the state-of-the-art for the synthesis of peptides or fragments of proteins: Small solid beads, insoluble yet porous, are treated with functional units (‘linkers’) on which peptide chains can be built. The peptide will remain covalently attached to the bead until cleaved from it by a reagent such as anhydrous hydrogen fluoride or trifluoroacetic acid. The peptide is thus ‘immobilized’ on the solid-phase and can be retained during a filtration process, whereas liquid-phase reagents and by-products of synthesis are flushed away. The general principle of SPPS is one of repeated cycles of coupling-wash-deprotection-wash. The free N-terminal amine of a solid-phase attached peptide is coupled (see below) to a single N-protected amino acid unit. This unit is then deprotected, revealing a new N-terminal amine to which a further amino acid may be attached. The superiority of this technique partially lies in the ability to perform wash cycles after each reaction, removing excess reagent with all of the growing peptide of interest remaining covalently attached to the insoluble resin. There are two majorly used forms of SPPS Fmoc and Boc. The N-termini of amino acid monomers is protected by either of these two groups and added onto a deprotected amino acid chain. SPPS is limited by yields, and typically peptides and proteins in the range of 70 amino acids are pushing the limits of synthetic accessibility. Synthetic difficulty also is sequence dependent. Larger synthetic oligopeptides and proteins can be accessed by using ligation methods such as fragment condensation, native chemical ligation or enzymatic ligation to couple two peptides together. However, the largest D-protein synthesized so far is the D-protein form of the angiogenic protein vascular endothelial growth factor (abbr. VEGF-A) consisting of 102 D-amino acids (Mandal et al., 2012),

[0147] Fragment condensation uses peptides wherein the side chains of the amino acids of the peptide are fully protected by chemical groups and the peptide are coupled in solution.

[0148] Native chemical ligation is carried out in aqueous solution. The challenge is the preparation of the necessary unprotected peptide-thioester building block. In native chemical ligation, the thiolate group of an N-terminal cysteine residue of an unprotected peptide 2 attacks the C-terminal thioester of a second unprotected peptide 1 in an aqueous buffer at pH 7.0, 20° C.<T<37° C. This reversible transthioesterification step is chemoselective and regioselective and leads to form a thioester intermediate 3. This intermediate rearranges by an intramolecular S,N-acyl shift that results in the formation of a native amide (‘peptide’) bond 4 at the ligation site.

[0149] As shown in the examples the inventors could surprisingly show that a C-terminal thioester that is necessary for native chemical ligation is stable under the conditions of enzymatic ligation, so that the native chemical ligation and enzymatic ligation can be used in combination.

[0150] Enzymatic ligation of D-peptides works by the use of proteases comprising the following steps: (a) preparation of an amino component, where said amino component is a uniquely D-peptide, (b) preparation of the carboxy component, where said carboxy component comprises a leaving group and is a uniquely D-peptide and (c) reaction of the amino component and the carboxy component in the presence of a protease to form a peptide bond between the amino component and the carboxy component with cleavage of the leaving group to give the uniquely D-polypeptide (see WO2003047743). Preferably the protease is Clostripain.

[0151] A polymerase of the present invention shall also comprise a polymerase which is essentially homologous to the polymerase of the present invention and in particular to the particular sequence(s) disclosed herein. The term substantially homologous shall be understood such as the homology is at least 75%, preferably 85%, more preferably 90% and most preferably more that 95%, 96%, 97%, 98% or 99%.

[0152] A polymerase activity exhibiting moiety of the present invention shall also comprise a polymerase activity exhibiting moiety which is essentially homologous to the polymerase activity exhibiting moiety of the present invention and in particular to the particular sequence(s) disclosed herein. The term substantially homologous shall be understood such as the homology is at least 75%, preferably 85%, more preferably 90% and most preferably more that 95%, 96%, 97%, 98% or 99%.

[0153] The actual percentage of homologous amino acids present in the polymerase of the present invention or polymerase activity exhibiting moiety of the present invention will depend on the total number of amino acids present in the polymerase or polymerase activity exhibiting moiety. The percent modification can be based upon the total number of amino acids present in the polymerase or polymerase activity exhibiting moiety.

[0154] The homology between two polymerases or two polymerase activity exhibiting moieties can be determined as known to the person skilled in the art. More specifically, a sequence comparison algorithm may be used for calculating the percent sequence homology for the test sequence(s) relative to the reference sequence, based on the designated program parameters. The test sequence is preferably the polymerase or polymerase activity exhibiting moiety which is said to be homologous or to be tested whether it is homologous, and if so, to what extent, to a different polymerase or polymerase activity exhibiting moiety, whereby such different polymerase or polymerase activity exhibiting moiety is also referred to as the homology reference sequence. Optimal alignment of amino acid sequences of the polymerase for comparison can be conducted, e.g., by the local homology algorithm of Smith & Waterman (Smith & Waterman, 1981) by the homology alignment algorithm of Needleman & Wunsch (Needleman & Wunsch, 1970) by the search for similarity method of Pearson & Lipman (Pearson & Lipman, 1988), by computerized implementations of these algorithms (GAP, BESTFIT, FASTA, and TFASTA in the Wisconsin Genetics Software Package, Genetics Computer Group, 575 Science Dr., Madison, Wis.), or by visual inspection.

[0155] One example of an algorithm that is suitable for determining percent sequence identity is the algorithm used in the basic local alignment search tool (hereinafter “BLAST”), see, e.g. Altschul et al (Altschul et al. 1990 and Altschul et al, 1997). Software for performing BLAST analyses is publicly available through the National Center for Biotechnology Information (hereinafter “NCBI”). The default parameters used in determining sequence identity using the software available from NCBI, e.g., BLASTN (for nucleotide sequences) and BLASTP (for amino acid sequences) are described in McGinnis et al (McGinnis et al, 2004).

[0156] A polymerase of the present invention shall also comprise polymerase which has a certain degree of identity relative to polymerase of the present invention and in particular to the particular polymerase of the present invention disclosed herein and defined by their amino acid sequence. More preferably, the instant invention also comprises those polymerases which have an identity of at least 75%, preferably 85%, more preferably 90% and most preferably more than 95%, 96%, 97%, 98% or 99% relative to the polymerase of the present invention and in particular to the particular polymerase of the present invention disclosed herein and defined by their amino acid sequence or a part thereof.

[0157] A polymerase activity exhibiting moiety of the present invention shall also comprise polymerase activity exhibiting moiety which has a certain degree of identity relative to polymerase activity exhibiting moiety of the present invention and in particular to the particular polymerase activity exhibiting moiety of the present invention disclosed herein and defined by their amino acid sequence. More preferably, the instant invention also comprises those polymerase activity exhibiting moieties which have an identity of at least 75%, preferably 85%, more preferably 90% and most preferably more than 95%, 96%, 97%, 98% or 99% relative to the polymerase activity exhibiting moiety of the present invention and in particular to the particular polymerase activity exhibiting moiety of the present invention disclosed herein and defined by their amino acid sequence or a part thereof.

[0158] In connection with the instant application the terms nucleic acid molecule and nucleic acid are used in an interchangeable manner if not explicitly indicated to the contrary.

[0159] As preferably used herein “nucleic acid” and “nucleic acid” refer to polynucleotides or oligonucleotides such as deoxyribonucleic acid (abbr. DNA) and ribonucleic acid (abbr. RNA). Moreover, the term “a nucleic acid” includes a plurality of nucleic acids. The terms “nucleic acid” and “nucleic acids” should also be understood to include, as equivalents, variants and analogs of either RNA or DNA made from nucleotide analogs, single (sense or antisense) and double-stranded polynucleotides or oligonucleotides. Deoxyribonucleotides include deoxyadenosine, deoxycytidine, deoxyguanosine and deoxythymidine. Ribonucleotides include adenosine, cytidine, guanosine and uridine. Reference to a nucleic acid molecule as a “polynucleotide” is used in its broadest sense to mean two or more nucleotides or nucleotide analogs linked by a covalent bond, including single stranded or double stranded molecules. The term “oligonucleotide” also is used herein to mean two or more nucleotides or nucleotide analogs linked by a covalent bond, although as defined herein oligonucleotides comprise less one hundred nucleotides.

[0160] The nucleic acid is characterized in that all of the consecutive nucleotides forming the nucleic acid are linked with or connected to each other by one or more than one covalent bond. More specifically, each of such nucleotides is linked with or connected to two other nucleotides, preferably through phosphodiester bonds or other bonds, forming a stretch of consecutive nucleotides. In such arrangement, however, the two terminal nucleotides, i.e. preferably the nucleotide at the 5′ end and at the 3′ end, are each linked to a single nucleotide only under the proviso that such arrangement is a linear and not a circular arrangement and thus a linear rather than a circular molecule.

[0161] In another embodiment of the present application the nucleic acid comprises at least two groups of consecutive nucleotides, whereby within each group of consecutive nucleotides each nucleotide is linked with or connected to two other nucleotides, preferably through phosphodiester bonds or other bonds, forming a stretch of consecutive nucleotides. In such arrangement, however, the two terminal nucleotides, i.e. preferably the nucleotide at the 5′ end and at the 3′ end, are each linked to a single nucleotide only. In such embodiment, the two groups of consecutive nucleotides, however, are not linked with or connected to each other through a covalent bond which links one nucleotide of one group and one nucleotide of another or the other group through a covalent bond, preferably a covalent bond formed between a sugar moiety of one of said two nucleotides and a phosphor moiety of the other of said two nucleotides or nucleosides. In an alternative embodiment, the two groups of consecutive nucleotides, however, are linked with or connected to each other through a covalent bond which links one nucleotide of one group and one nucleotide of another or the other group through a covalent bond, preferably a covalent bond formed between a sugar moiety of one of said two nucleotides and a phosphor moiety of the other of said two nucleotides or nucleosides. Preferably, the at least two groups of consecutive nucleotides are not linked through any covalent bond. In another preferred embodiment, the at least two groups are linked through a covalent bond which is different from a phosphodiester bond.

[0162] The term nucleic acid preferably also encompasses either a D-nucleic acid or a L-nucleic acid. Preferably, the nucleic acid is L-nucleic acid l. In addition it is possible that one or several parts of the nucleic acid is present as a D-nucleic acid and at least one or several parts of the nucleic acid is an L-nucleic acid. The term “part” of the nucleic acid shall mean as little as one nucleotide. Such nucleic acid is generally referred to herein as D- and L-nucleic acid, respectively. Therefore, in a preferred embodiment, the nucleic acid according to the present invention consist of L-nucleotides and comprise at least one D-nucleotide. Preferably, such D-nucleotide is attached at a terminus of any of the stretches and of any nucleic acid.

[0163] L-nucleic acid as used herein is a nucleic acid consisting of L-nucleotides, preferably consisting completely of L-nucleotides.

[0164] D-nucleic acid as used herein is nucleic acid consisting of D-nucleotides, preferably consisting completely of D-nucleotides.

[0165] Also, if not indicated to the contrary, any nucleotide sequence is set forth herein in 5′→3′ direction.

[0166] Irrespective of whether the nucleic acid consists of D-nucleotides, L-nucleotides or a combination of both with the combination being e.g. a random combination or a defined sequence of stretches consisting of at least one L-nucleotide and at least one D-nucleic acid, the nucleic acid molecule may consist of desoxyribonucleotide(s), ribonucleotide(s) or combinations thereof.

[0167] Regardless of whether the nucleic acid is a D-nucleic acid, an L-nucleic acid, a mixture thereof, a DNA, or an RNA, or each and any combination thereof, the term nucleic acid as preferably used herein shall also encompass single-stranded nucleic acid and double-stranded nucleic acid, whereby preferably the nucleic acid molecule as subjected to the method according to the present invention is a single-stranded nucleic acid.

[0168] The term nucleic acid as preferably used herein, shall also encompass a modified nucleic acid. The modified nucleic acid can be a nucleotide-modified RNA or a nucleotide-modified DNA molecule, whereby the RNA or DNA molecules are extensively modified at the individual nucleotides to enhance stability by modification with nuclease resistant groups, for example, 2′-amino, 2′-C-allyl, 2′-fluoro, 2′-O-methyl, 2′-H (for a review see Usman & Cedergren, 1992).

[0169] The term nucleic acid as preferably used herein, shall also encompass a fully closed nucleic acid. A fully closed, i.e. circular structure for the nucleic acid is realized if the nucleic acid the nucleotide sequence of which is to be determined according to the present invention, is closed, preferably through a covalent linkage, whereby more preferably such covalent linkage is made between the 5′ end and the 3′ end of the nucleic acid molecules sequences as disclosed herein.

[0170] The term nucleic acid as preferably used shall also encompass any nucleic acid molecule which comprises a non-nucleic acid molecule moiety. Such non-nucleic acid molecule moiety may be selected from a group comprising peptides, oligopeptides, polypeptides, proteins, carbohydrates, various groups as will be outlined in more detail in the following. The term nucleic acid e shall thus also encompass conjugates and/or complexes comprising at least one nucleic acid moiety and at least one further moiety that can be used to facilitate delivery of nucleic acid molecules into a biological system, such as a cell. The conjugates and complexes provided can impart therapeutic activity by transferring therapeutic compounds across cellular membranes, altering the pharmacokinetics, and/or modulating the localization of nucleic acid of the invention. These kinds of conjugates and complexes are preferably suitable for the delivery of molecules, including, but not limited to, small molecules, lipids, phospholipids, nucleosides, nucleotides, nucleic acids, antibodies, toxins, negatively charged polymers and other polymers, for example proteins, peptides, hormones, carbohydrates, polyethylene glycols, or polyamines, across cellular membranes. In general, the transporters described are designed to be used either individually or as part of a multi-component system, with or without degradable linkers. These compounds are expected to improve delivery and/or localization of nucleic acid molecules into a number of cell types originating from different tissues, in the presence or absence of serum (see U.S. Pat. No. 5,854,038). Conjugates of the molecules described herein can be attached to biologically active molecules via linkers that are biodegradable, such as biodegradable nucleic acid linker molecules.

[0171] As will be detailed in the following in connection with the nucleic acid the sequence of which is to be determined, the non-nucleic acid moiety may be a PEG moiety, i.e. a poly(ethylene glycol) moiety, or a HES moiety, i.e. a hydroxyethyl starch moiety.

[0172] The non-nucleic acid moiety and preferably the PEG and/or HES moiety can be attached to the nucleic acid molecule either directly or through a linker. It is also within the present invention that the nucleic acid molecule comprises one or more modifications, preferably one or more PEG and/or HES moiety. In an embodiment the individual linker molecule attaches more than one PEG moiety or HES moiety to a nucleic acid molecule. The linker used in connection with the present invention can itself be either linear or branched. These kind of linkers are known to the ones skilled in the art and are further described in the patent applications WO 2005/074993 and WO 2003/035665.

[0173] In a preferred embodiment the linker is a biodegradable linker. The biodegradable linker allows to modify the characteristics of the nucleic acid molecules in terms of, among other, residence time in the animal body, preferably in the human body, due to release of the modification from the nucleic acid molecules. Usage of a biodegradable linker may allow a better control of the residence time of the nucleic acid molecules. A preferred embodiment of such biodegradable linkers are biodegradable linkers such as those described in but not restricted to the international patent applications WO 2006/052790, WO 2008/034122, WO 2004/092191 and WO 2005/099768, whereby in the international patent applications WO 2004/092191 and WO 2005/099768, the linker is part of a polymeric oligonucleotide prodrug, that consists of one or two modifications as described herein, a nucleic acid molecule and the biodegradable linker in between.

[0174] As preferably used herein, “nucleotides” include, but are not limited to, the naturally occurring DNA nucleoside mono-, di-, and triphosphates: deoxyadenosine mono-, di- and triphosphate; deoxyguanosine mono-, di- and triphosphate; deoxythymidine mono-, di- and triphosphate; and deoxycytidine mono-, di- and triphosphate. (referred to herein as dA, dG, dT and dC or A, G, T and C, respectively). The term nucleotides also includes the naturally occurring RNA nucleoside mono-, di-, and triphosphates: adenosine mono-, di- and triphosphate; guanine mono-, di- and triphosphate; uridine mono-, di- and triphosphate; and cytidine mono-, di- and triphosphate (referred to herein as A, G, U and C, respectively) refers to a base-sugar-phosphate combination that is the monomeric unit of a nucleic acid molecule, i. e., a DNA molecule and an RNA molecule. However, in other words, the term “nucleotides” refers to any compound containing a cyclic furanoside-type sugar (p-D/L-ribose in RNA and P-D/L-2′-deoxyribose in DNA), which is phosphorylated at the 5′ position and has either a purine or pyrimidine-type base attached at the C-l′sugar position via a -glycosol C1′-N linkage. The nucleotides may be natural or synthetic, including a nucleotide that has been mass-modified including, inter alia, nucleotides having modified nucleosides with modified bases (e. g., 5-methyl cytosine) and modified sugar groups (e. g., 2′-O-methyl ribosyl, 2′-O-methoxyethyl ribosyl, 2′-fluoro ribosyl, 2′-amino ribosyl, and the like).

[0175] The term “nucleobase” covers the naturally occurring nucleobases adenine (A), guanine (G), cytosine (C), thymine (T) and uracil (U) as well as non-naturally occurring nucleobases such as xanthine, diaminopurine, 8-oxo-N6-methyladenine, 7-deazaxanthine, 7-deazaguanine, N4,N4-ethanocytosin, N6,N6-ethano-2,6-diaminopurine, 5-methylcytosine, 5˜(C3-C6)-alkynyl-cytosine, 5-fluorouracil, 5-bromouracil, pseudoisocytosine, 2-hydroxy-5-methyl-4-triazolopyridin, isocytosine, isoguanine, inosine and the “non-naturally occurring” nucleobases described in the U.S. Pat. No. 5,432,272, in the publication of Freier & Altmann (Freier & Altmann, 1997). The term “nucleobase” thus includes not only the known purine and pyrimidine heterocycles, but also heterocyclic analogues and tautomers thereof.

[0176] It is within the present invention that the single-stranded nucleic acid can form distinct and stable three-dimensional structures and specifically bind to a target molecule like antibodies. Such nucleic acid molecules composed of D-nucleotides are called aptamers. Aptamers can be identified against several target molecules, e.g. small molecules, proteins, nucleic acids, and even cells, tissues and organisms and can inhibit the in vitro and/or in vivo function of the specific target molecule. Aptamers are usually identified by a target-directed selection process, called in vitro selection or Systematic Evolution of Ligands by Exponential Enrichment (abbr. SELEX) (Bock et al, 1992; Ellington & Szostak, 1990; Tuerk & Gold, 1990). Non-modified aptamers are cleared rapidly from the bloodstream, with a half-life of minutes to hours, mainly due to nuclease degradation and clearance from the body by the kidneys, a result of the aptamer's inherently low molecular weight. Hence, in order to use aptamers therapeutically they have to be modified at the 2′ position of the sugar (e.g. ribose) backbone (Burmester et al, 2006).

[0177] The omnipresent nucleases which account for the instability of aptamers consist of chiral building blocks, i.e. L-amino acids. Consequently, the structure of nucleases is inherently chiral as well, resulting in stereospecific substrate recognition. Hence, these enzymes only accept substrate molecules in the adequate chiral configuration. Since aptamers and naturally occurring nucleic acid molecules are composed of D-nucleotides, an L-oligonucleotide should escape from enzymatic recognition and subsequent degradation. Due to the same principle, unfortunately in this case, nature developed no enzymatic activity to amplify such mirror-image nucleic acids. Accordingly, L-nucleic acid aptamers cannot be directly obtained employing the SELEX process. The principles of stereochemistry, though, reveal a detour which eventually leads to the desired functional L-nucleic acid aptamers.

[0178] If an in vitro selected (D-)aptamer binds its natural target, the structural mirror-image of this aptamer binds with the same characteristics the mirror-image of the natural target. Here, both interaction partners have the same (unnatural) chirality. Due to the homochirality of life and most biochemical compounds, such enantio-RNA ligands, of course, would be of limited practical use. If, on the other hand, the SELEX process is carried out against an (unnatural) mirror-image target, an aptamer recognizing this (unnatural) target will be obtained. The corresponding mirror-image configuration of said aptamer—the desired L-aptamer—in turn recognizes the natural target. This mirror-image selection process for the generation of biostable nucleic acid molecule was published first in 1996 (Klussmann et al, 1996; Nolte et al, 1996) and results in the generation of functional mirror-image nucleic acid molecule ligands that display not only high affinity and specificity for a given target molecule, but at the same time also biological stability. It is within the present invention that the single-stranded nucleic acid molecule is such a ligand-binding L-nucleic acid that is referred as ‘spiegelmer’ (from the German word ‘Spiegel’, mirror) (see ‘The Aptamer Handbook’; eds. Klussmann, 2006)

[0179] Among others, the nucleic acids according to the present invention may comprise a modification, which preferably allows the detection of the nucleic acids according to the present invention. Such a modification is preferably selected from the group comprising radioactive, enzymatic and fluorescent labels. Such modification is also selected from D-nucleotides that itself can by modified by a modification selected from the group comprising radioactive, enzymatic and fluorescent labels.

[0180] The various SEQ.ID.Nos., the chemical nature of the nucleic acids, peptides, oligopeptides and protein as used herein, the actual sequence thereof and the internal reference number is summarized in the following table.

TABLE 1(A)
SEQUENCES REFERRED TO IN THIS APPLICATION

| SEQ | | | Internal |
|---|---|---|---|
| ID NO: | Type | Sequence | Reference |
| 1 | Protein | MLTLIQGKKIVNHLRSRLAFEYNGQLIKILSKNIVAVGSLRREEKMLNDVDLLIIVPEKK | Pol-X, polymerase X |
| | | LLKHVLPNIRIKGLSFSVKVCGERKCVLFIEWEKKTYQLDLFTALAEEKPYAIFHFTGPV | |
| | | SYLIRIRAALKKKNYKLNQYGLFKNQTLVPLKITTEKELIKELGFTYRIPKKRL | |
| 2 | Protein | MLTLIQGKKIVNHLRSRLAFEYNGQLIKILSKNIVAVGSLRREEKMLNDVDLLIIVPEKK | Pol-X V80G, |
| | | LLKHVLPNIRIKGLSFSVK [symbol] CGERKCVLFIEWEKKTYQLDLFTALAEEKPYAIFHFTGPV | polymerase X variant |
| | | SYLIRIRAALKKKNYKLNQYGLFKNQTLVPLKITTEKELIKELGFTYRIPKKRL | V80G |
| 3 | Protein | MLTLIQGKKIVNHLRSRLAFEYNGQLIKILSKNIVAVGSLRREEKMLNDVDLLIIVPEKK | Pol-X V80A, |
| | | LLKHVLPNIRIKGLSFSVK [symbol] CGERKCVLFIEWEKKTYQLDLFTALAEEKPYAIFHFTGPV | polymerase X variant |
| | | SYLIRIRAALKKKNYKLNQYGLFKNQTLVPLKITTEKELIKELGFTYRIPKKRL | V80A |
| 4 | Protein | MLTLIQGKKIVNHLRSRLAFEYNGQLIKILSKNIVAVGSLRREEKMLNDVDLLIIVPEKK | Pol-X I124G, |
| | | LLKHVLPNIRIKGLSFSVKVCGERKCVLFIEWEKKTYQLDLFTALAEEKPYAIFHFTGPV | polymerase X variant |
| | | SYL [symbol] RIRAALKKKNYKLNQYGLFKNQTLVPLKITTEKELIKELGFTYRIPKKRL | I124G |
| 5 | Protein | MLTLIQGKKIVNHLRSRLAFEYNGQLIKILSKNIVAVGSLRREEKMLNDVDLLIIVPEKK | Pol-X C86S, |
| | | LLKHVLPNIRIKGLSFSVKVCGERK [symbol] SVLFIEWEKKTYQLDLFTALAEEKPYAIFHFTGPV | polymerase X variant |
| | | SYLIRIRAALKKKNYKLNQYGLFKNQTLVPLKITTEKELIKELGFTYRIPKKRL | C86S |
| 6 | D/L-DNA | D(GG)-L(GATCACAGTGAGTAC) | MJ_1_58_MD |
| 7 | L-DNA | Phosphate-GTAAAACGACGGCCAGT | MJ_1_143_LD |
| 8 | L-DNA | ACTGGCCGTCGTTTTAC [symbol] GTACTCACTGTGATC | MJ_1_145_LD |
| 9 | L-DNA | ACTGGCCGTCGTTTTAC [symbol] GTACTCACTGTGATC | MJ_1_146_LD |
| 10 | L-DNA | ACTGGCCGTCGTTTTAC [symbol] GTACTCACTGTGATC | MJ_1_147_LD |
| 11 | L-DNA | ACTGGCCGTCGTTTTAC [symbol] GTACTCACTGTGATC | MJ_1_144_LD |
| 12 | D/L-DNA | D(GG)-L(GATCACAGTGAGTAC) | MJ_158_MD |
| 13 | L-DNA | Phosphate-ACGACGGCCAGT | MJ_1_59_LD |
| 14 | L-DNA | ACTGGCCGTCGTTCTATTGTACTCACTGTGATC | MJ_1_57_LD |
| 15 | Protein | MIVLFVDFDYFYAQVEEVLNPSLKGKPVVVCVFSGRFEDSGAVATANYEARKFGVKA | Dpo4, polymerase |
| | | GIPIVEAKKILPNAVYLPMRKEVYQQVSSRIMNLLREYSEKIEIASIDEAYLDISDKVRD | Dpo4, Dpo 4 |
| | | YREAYNLGLEIKNKILEKEKITVTVGISKNKVFAKIAADMAKPNGIKVIDDEEVKRLIRE | Sulfolobus |
| | | LDIADVPGIGNITAEKLKKLGINKLVDTLSIEFDKLKGMIGEAKAKYLISLARDEYNEPI | solfataricus |
| | | RTRVRKSIGRIVTMKRNSRNLEEIKPYLFRAIEESYYKLDKRIPKAIHVVAVTEDLDIVS | |
| | | RGRTFPHGISKETAYSESVKLLQKILEEDERKIRRIGVRFSKFIEAIGLDKFFDT | |
| 16 | Protein | MIVLFVDFDYFYAQVEEVLNPSLKGKPVVVCVFSGRFEDSGAVATANYEARKFGVKA | Dpo4 A155C, |
| | | GIPIVEAKKILPNAVYLPMRKEVYQQVSSRIMNLLREYSEKIEIASIDEAYLDISDKVRD | polymerase Dpo4 |
| | | YREAYNLGLEIKNKILEKEKITVTVGISKNKVFAKIA [symbol] DMAKPNGIKVIDDEEVKRLIRE | variant A155C |
| | | LDIADVPGIGNITAEKLKKLGINKLVDTLSIEFDKLKGMIGEAKAKYLISLARDEYNEPI | |
| | | RTRVRKSIGRIVTMKRNSRNLEEIKPYLFRAIEESYYKLDKRIPKAIHVVAVTEDLDIVS | |
| | | RGRTFPHGISKETAYSESVKLLQKILEEDERKIRRIGVRFSKFIEAIGLDKFFDT | |
| 17 | Protein | MIVLFVDFDYFYAQVEEVLNPSLKGKPVVVCVFSGRFEDSGAVATANYEARKFGVKA | Dpo4 V203C, |
| | | GIPIVEAKKILPNAVYLPMRKEVYQQVSSRIMNLLREYSEKIEIASIDEAYLDISDKVRD | polymerase Dpo4 |
| | | YREAYNLGLEIKNKILEKEKITVTVGISKNKVFAKIAADMAKPNGIKVIDDEEVICRLIRE | variant V203C, |
| | | LDIADVPGIGNITAEKLKKLGINK [symbol] CDTLSIEFDKLKGMIGEAKAKYLISLARDEYNEPI | |
| | | RTRVRKSIGRIVTMKRNSRNLEEIKPYLFRAIEESYYKLDKRIPKAIHVVAVTEDLDIVS | |
| | | RGRTFPHGISKETAYSESVICLLQKILEEDERKIRRIGVRFSKFIEAIGLDKFFDT | |
| 18 | Protein | MIVLFVDFDYFYAQVEEVLNPSLKGKPVVVCVFSGRFEDSGAVATANYEARKFGVKA | Dpo4 A155C/V203C, |
| | | GIPIVEAKKILPNAVYLPMRKEVYQQVSSRIMNLLREYSEKIEIASIDEAYLDISDKVRD | polymerase Dpo4 |
| | | YREAYNLGLEIKNKILEKEKITVTVGISKNKVFAKIA [symbol] DMAKPNGIKVIDDEEVKRLIRE | variant |
| | | LDIADVPGIGNITAEKLKKLGINKL [symbol] DTLSIEFDKLKGMIGEAKAKYLISLARDEYNEPI | A155C/V203C, |
| | | RTRVRKSIGRIVTMKRNSRNLEEIKPYLFRAIEESYYKLDKRIPKAIHVVAVTEDLDIVS | |
| | | RGRTFPHGISKETAYSESVKLLQKILEEDERKIRRIGVRFSKFIEAIGLDKFFDT | |
| 19 | Protein | MIVLFVDFDYFYAQVEEVLNPSLKGKPVVV [symbol] VFSGRFEDSGAVATANYEARKFGVKA | Dpo4 C31S, |
| | | GIPIVEAKKILPNAVYLPMRKEVYQQVSSRIMNLLREYSEKIEIASIDEAYLDISDKVRD | polymerase Dpo4 |
| | | YREAYNLGLEIKNKILEKEKITVTVGISKNKVFAKIAADMAKPNGIKVIDDEEVKRLIRE | variant C31S, |
| | | LDIADVPGIGNITAEKLKKLGINKLVDTLSIEFDKLKGMIGEAKAKYLISLARDEYNEPI | |
| | | RTRVRKSIGRIVTMKRNSRNLEEIKPYLFRAIEESYYKLDKRIPKAIHVVAVTEDLDIVS | |
| | | RGRTFPHGISKETAYSESVKLLQKILEEDERKIRRIGVRFSKFIEAIGLDKFFDT | |
| 20 | Protein | MIVLFVDFDYFYAQVEEVLNPSLKGKPVVVCVFSGRFEDSGAVATANYEARKFGVKA | Dpo4 S85C, |
| | | GIPIVEAKKILPNAVYLPMRKEVYQQV [symbol] SRIMNLLREYSEKIEIASIDEAYLDISDKVRD | polymerase Dpo4 |
| | | YREAYNLGLEIKNKILEKEKITVTVGISKNKVFAKIAADMAKPNGIKVIDDEEVKRLIRE | variant S85C |
| | | LDIADVPGIGNITAEKLKKLGINKLVDTLSIEFDKLKGMIGEAKAKYLISLARDEYNEPI | |
| | | RTRVRKSIGRIVTMKRNSRNLEEIKPYLFRAIEESYYKLDKRIPKAIHVVAVTEDLDIVS | |
| | | RGRTFPHGISKETAYSESVKLLQKILEEDERKIRRIGVRFSKFIEAIGLDKFFDT | |
| 21 | Protein | MIVLFVDFDYFYAQVEEVLNPSLKGKPVVVCVFSGRFEDSGAVATANYEARKFGVKA | Dpo4 S86C, |
| | | GIPIVEAKKILPNAVYLPMRKEVYQQVS [symbol] RIMNLLREYSEKIEIASIDEAYLDISDKVRD | polymerase Dpo4 |
| | | YREAYNLGLEIKNKILEKEKITVTVGISKNKVFAKIAADMAKPNGIKVIDDEEVKRLIRE | variant S86C |
| | | LDIADVPGIGNITAEKLKKLGINKLVDTLSIEFDKLKGMIGEAKAKYLISLARDEYNEPI | |
| | | RTRVRKSIGRIVTMKRNSRNLEEIKPYLFRAIEESYYKLDKRIPKAIHVVAVTEDLDIVS | |
| | | RGRTFPHGISKETAYSESVKLLQKILEEDERKIRRIGVRFSKFIEAIGLDKFFDT | |
| 22 | Protein | MIVLFVDFDYFYAQVEEVLNPSLKGKPVVVCVFSGRFEDSGAVATANYEARKFGVKA | Dpo4 S96C, |
| | | GIPIVEAKKILPNAVYLPMRKEVYQQVSSRIMNLLREY [symbol] EKIEIASIDEAYLDISDKVRD | polymerase Dpo4 |
| | | YREAYNLGLEIKNKILEKEKITVTVGISKNKVFAKIAADMAKPNGIKVIDDEEVKRLIRE | variant S96C, |
| | | LDIADVPGIGNITAEKLKKLGINKLVDTLSIEFDKLKGMIGEAKAKYLISLARDEYNEPI | |
| | | RTRVRKSIGRIVTMKRNSRNLEEIKPYLFRAIEESYYKLDKRIPKAIHVVAVTEDLDIVS | |
| | | RGRTFPHGISKETAYSESVKLLQKILEEDERKIRRIGVRFSKFIEAIGLDKFFDT | |
| 23 | L-DNA | GTGGAACCGACAACTTGTGCTGCGTCCAGCATAAGAAAGGAGCTCCCTCAGAAGA | MJ_1_105_LD |
| | | AGCTGCGCAGCGTGCCAGTCTGAGCTCC | |
| 24 | L-DNA | TCTAATACGACTCACTATAGGAGCTCAGACTGGCACGC | MJ_oligo_187_LD |
| 25 | L-DNA | GTGGAACCGACAACTTGTGC | MJ_oligo_189_LD |
| 26 | D-DNA | ATGCTGACCCTGATTCAGGGCAAAAAAATCGTGAACCATCTGCGTAGCCGTCTGG | ASFV Pol-X ORF |
| | | CCTTTGAATATAACGGCCAGCTGATTAAAATTCTGAGCAAAAACATTGTGGCGGT | E.coli codon |
| | | GGGCAGCCTGCGTCGTGAAGAAAAAATGCTGAACGATGTGGATCTGCTGATTATT | optimized |
| | | GTGCCGGAAAAAAAACTGCTGAAACATGTGCTGCCGAACATTCGTATTAAAGGCC | |
| | | TGAGCTTTAGCGTGAAAGTGTGCGGCGAACGTAAATGCGTGCTGTTTATCGAATG | |
| | | GGAAAAAAAAACCTACCAGCTGGACCTGTTTACCGCGCTGGCCGAAGAAAAACC | |
| | | GTATGCGATCTTTCATTTTACCGGTCCGGTGAGCTATCTGATTCGTATTCGTGCGG | |
| | | CGCTGAAAAAAAAAAACTACAAACTGAACCAGTATGGCCTGTTTAAAAACCAGAC | |
| | | CCTGGTGCCGCTGAAAATTACCACCGAAAAAGAACTGATTAAAGAACTGGGCTTT | |
| | | ACCTATCGCATTCCGAAAAAACGCCTGTAATAA | |
| 27 | Protein | MRGSHHHHHHGMASMTGGQQMGRDLYDDDDKDRWGSMLTLIQGKKIVNHLRSRL | His-tagged Pol-X |
| | | AFEYNGQLIKILSKNIVAVGSLRREEKMLNDVDLLIIVPEKKLLKHVLPNIRIKGLSFSV | protein sequence as |
| | | KVCGERKCVLFIEWEKKTYQLDLFTALAEEKPYAIFHFTGPVSYLIRIRAALKKKNYKL | encoded in pMJ14 |
| | | NQYGLEKNQTLVPLKITTEKELIKELGFTYRIPKKRL | |
| 28 | D-DNA | TCCGGTGAGCTATCTGGGTCGTATTCGTGCGGCG | QC10_up |
| 29 | D-DNA | CGCCGCACGAATACGACCCAGATAGCTCACCGGA | QC10_low |
| 30 | D-DNA | TGAGCTTTAGCGTGAAAGGGTGCGGCGAACG | QC26_up |
| 31 | D-DNA | CGTTCGCCGCACCCTTTCACGCTAAAGCTCA | QC26_low |
| 32 | D-DNA | TGAGCTTTAGCGTGAAAGCGTGCGGCGAACG | QC27_up |
| 33 | D-DNA | CGTTCGCCGCACGCTTTCACGCTAAAGCTCA | QC27_low |
| 34 | D-DNA | TGAAAGTGTGCGGCGAACGTAAAAGCGTGCTGTTTA | QC31_up |
| 35 | D-DNA | TAAACAGCACGCTTTTACGTTCGCCGCACACTTTCA | QC31_low |
| 36 | D-DNA | GATCACAGTGAGTAC | SP-1 |
| 37 | D-DNA | Phosphate-GTAAAACGACGGCCAGT | D(g1)P |
| 38 | D-DNA | ACTGGCCGTCGTTTTAC [symbol] GTACTCACTGTGATC | MJ_1_140_DD |
| 39 | D-DNA | ACTGGCCGTCGTTTTAC [symbol] GTACTCACTGTGATC | MJ_1_141_DD |
| 40 | D-DNA | ACTGGCCGTCGTTTTAC [symbol] GTACTCACTGTGATC | MJ_1_142_DD |
| 41 | D-DNA | ACTGGCCGTCGTTTTAC [symbol] GTACTCACTGTGATC | SP1c + 18(g1) |
| 42 | D-DNA | Phosphate-ACGACGGCCAGT | D(g6)P |
| 43 | Protein | AcMLTLIQGKKIVNHLRSRLAFEYNGQLIKILSKNIVAVGSL-OGp | example 3 product |
| | | | (1) |
| 44 | Protein | H-RREEKMLNDVDLLIIVPEKKLLKHVLPNIRIKGLSFSVKA-SMe | example 3 product |
| | | | (2) |
| 45 | Protein | H-CGERKCVLFIEWEKKTYQLDLFTALAEEKPYAIFHFTGPVSYLIRIRAALKKKNYKL | example 3 product |
| | | NQYGLFKNQTLVPLKITTEKELIKELGFTYRIPKKRL-OH | (3) |
| 46 | Protein | Ac-MLTLIQGKKIVNHLRSRLAFEYNGQLIKILSKNIVAVGSLRREEKMLNDVDLLIIVPE | example 4 product |
| | | KKLLKHVLPNIRIKGLSFSVKA-SMe | (4) |
| 47 | D-DNA | Atto532-GGAGCTCAGACTGGCACGC | MJ_1_33_DD |
| 48 | D-DNA | GTGGAACCGACAACTTGTGCTGCGTCCAGCATAAGAAAGGAGCTCCCTCAGAAGA | MJ_1_1_DD |
| | | AGCTGCGCAGCGTGCCAGTCTGAGCTCC | |
| 49 | D/L-DNA | D(GG)-L(GGAGCTCAGACTGGCACGC) | MJ_1_109_MD |
| 50 | D-DNA | ATGATTGTGCTGTTTGTGGATTTTGATTATTTTTATGCCCAGGTGGAAGAAGTTCT | Sso Dpo4 ORF E.coli |
| | | GAATCCGAGCCTGAAAGGTAAACCGGTTGTTGTTTGTGTTTTTAGCGGTCGCTTTG | codon optimized |
| | | AAGATAGCGGTGCAGTTGCAACCGCCAATTATGAAGCCCGTAAATTTGGTGTTAA | |
| | | AGCCGGTATTCCGATTGTTGAAGCCAAAAAAATTCTGCCGAATGCAGTTTATCTGC | |
| | | CGATGCGCAAAGAAGTTTATCAGCAGGTTAGCAGCCGTATTATGAATCTGCTGCG | |
| | | CGAATATAGCGAAAAAATTGAAATTGCCAGCATTGATGAAGCCTATCTGGATATT | |
| | | AGCGATAAAGTGCGCGATTATCGCGAAGCATATAATCTGGGCCTGGAAATTAAAA | |
| | | ATAAAATCCTGGAAAAAGAAAAAATTACCGTGACCGTGGGCATTAGCAAAAATA | |
| | | AAGTGTTTGCCAAAATTGCAGCAGATATGGCAAAACCGAATGGCATTAAAGTGAT | |
| | | TGATGATGAAGAAGTGAAACGTCTGATTCGCGAACTGGATATTGCAGATGTTCCG | |
| | | GGTATTGGCAATATTACCGCAGAAAAACTGAAAAAACTGGGCATTAATAAACTGG | |
| | | TTGATACCCTGAGCATTGAATTTGATAAACTGAAAGGCATGATTGGTGAAGCGAA | |
| | | AGCCAAATATCTGATTAGCCTGGCACGTGATGAATATAATGAACCGATTCGTACC | |
| | | CGTGTTCGTAAAAGCATTGGTCGTATTGTGACCATGAAACGCAATAGCCGTAATCT | |
| | | GGAAGAAATTAAACCGTACCTGTTTCGTGCAATTGAAGAAAGCTATTATAAACTG | |
| | | GATAAACGCATTCCGAAAGCCATTCATGTTGTTGCAGTTACCGAAGATCTGGATAT | |
| | | TGTTAGCCGTGGTCGTACCTTTCCGCATGGTATTAGCAAAGAAACCGCCTATAGCG | |
| | | AAAGCGTTAAACTGCTGCAGAAAATCCTGGAAGAAGATGAACGTAAAATTCGTCG | |
| | | TATTGGTGTGCGCTTTAGCAAATTTATTGAAGCCATTGGCCTGGATAAATTTTTTG | |
| | | ATACC | |
| 51 | Protein | MASAWSHPQFEKSGMIVLFVDFDYFYAQVEEVLNPSLKGKPVVVCVFSGRFEDSGAV | Strep-tagged Dpo4 |
| | | ATANYEARKFGVKAGIPIVEAKKILPNAVYLPMRKEVYQQVSSRIMNLLREYSEKIEIA | protein sequence as |
| | | SIDEAYLDISDKVRDYREAYNLGLEIKNKILEKEKITVTVGISKNKVFAKIAADMAKPN | encoded in pMJ343 |
| | | GIKVIDDEEVKRLIRELDIADVPGIGNITAEKLKKLGINKLVDTLSIEFDKLKGMIGEAKA | |
| | | KYLISLARDEYNEPIRTRVRKSIGRIVTMKRNSRNLEEIKPYLFRAIEESYYKLDKRIPKA | |
| | | IHVVAVTEDLDIVSRGRTFPHGISKETAYSESVKLLQKILEEDERKIRRIGVRFSKFIEAIG | |
| | | LDKFFDTGS | |
| 52 | D-DNA | CAAAAATAAAGTGTTTGCCAAAATTGCATGCGATATGGCAAAACCG | QC_28_up |
| | | AATGGCATTAAAG | |
| 53 | D-DNA | CTTTAATGCCATTCGGTTTTGCCATATCGCATGCAATTTTGGCAAA | QC_28_low |
| | | CACTTTATTTTTG | |
| 54 | D-DNA | TGAAAAAACTGGGCATTAATAAACTGTGTGATACCCTGAGCATTGAATTTG | QC_29_up |
| 55 | D-DNA | CAAATTCAATGCTCAGGGTATCACACAGTTTATTAATGCCCAGTTTTTTCA | QC_29_low |
| 56 | D-DNA | TGAAAGGTAAACCGGTTGTTGTTTCTGTTTTTAGCGGTC | QC_30_up |
| 57 | D-DNA | GACCGCTAAAAACAGAAACAACAACCGGTTTACCTTTCA | QC_30_low |
| 58 | D-DNA | ATGCGCAAAGAAGTTTATCAGCAGGTTTGTAGCCGTATTATGAATC | QC_38_up |
| 59 | D-DNA | GATTCATAATACGGCTACAAACCTGCTGATAAACTTCTTTGCGCAT | QC_38_low |
| 60 | D-DNA | AAGTTTATCAGCAGGTTAGCTGTCGTATTATGAATCTGCTGCG | QC_39_up |
| 61 | D-DNA | CGCAGCAGATTCATAATACGACAGCTAACCTGCTGATAAACTT | QC_39_low |
| 62 | D-DNA | ATTATGAATCTGCTGCGCGAATATTGTGAAAAAATTGAAATTGCCAGCATT | QC_40_up |
| 63 | D-DNA | AATGCTGGCAATTTCAATTTTTTCACAATATTCGCGCAGCAGATTCATAAT | QC_40_low |
| 64 | D-DNA | Phosphate-AGCGGCTCTTCGATGATTGTGCTGTTTGTGGATTTT | MJ_1_90_DD |
| 65 | D-DNA | Phosphate-AGCGGCTCTTCGGCATGCAATTTTGGCAAACACTTT | MJ_1_91_DD |
| 66 | D-DNA | Phosphate-AGCGGCTCTTCGTGCATCACGGGAGAT | MJ_1_72_DD |
| 67 | D-DNA | Phosphate-AGCGGCTCTTCGCCCTTGAAGCTGCCACAAGGCAGGAACGTT | MJ_1_73_DD |
| 68 | Protein | MIVLFVDFDYFYAQVEEVLNPSLKGKPVVVCVFSGRFEDSGAVATANYEARKFGVKA | Dpo4 fragment |
| | | GIPIVEAKKILPNAVYLPMRKEVYQQVSSRIMNLLREYSEKIEIASIDEAYLDISDKVRD | 1-154 |
| | | YREAYNLGLEIKNKILEKEKITVTVGISKNKVFAKIA-thioester | |
| 69 | D-DNA | Phosphate-AGCGGCTCTTCGATGGGAGGGAAATCAAACGGGGAA | MJ_1_99_DD |
| 70 | D-DNA | Phosphate-AGCGGCTCTTCGGCACAAAGCTTTGAAGAGCTTGTC | MJ_1_100_DD |
| 71 | D-DNA | Phosphate-AGCGGCTCTTCGTGCGATATGGCAAAACCGAATGGCATTAAA | MJ_1_96_DD |
| 72 | D-DNA | Phosphate-AGCGGCTCTTCGCCCTTAGGTATCAAAAAATTTATCCAGG | MJ_1_97_DD |
| 73 | Protein | [symbol] DMAKPNGIKVIDDEEVKRLIRELDIADVPGIGNITAEKLKKLGINKLVDTLSIEFDKLK | Dpo4 A155C |
| | | GMIGEAKAKYLISLARDEYNEPIRTRVRKSIGRIVTMKRNSRNLEEIKPYLFRAIEESYY | fragment 155-352 |
| | | KLDKRIPKAIHVVAVTEDLDIVSRGRTFPHGISKETAYSESVKLLQKILEEDERKIRRIGV | |
| | | RFSKFIEAIGLDKFFDT | |
| 74 | D-DNA | Phosphate-AGCGGCTCTTCGTGTGATACCCTGAGCATTGAATTT | MJ_1_98_DD |
| 75 | Protein | [symbol] DTLSIEFDKLKGMIGEAKAKYLISLARDEYNEPIRTRVRKSIGRIVTMKRNSRNLEEIK | Dpo4 V203C |
| | | PYLFRAIEESYYKLDKRIPKAIHVVAVTEDLDIVSRGRTFPHGISKETAYSESVKLLQKIL | fragment 203-352 |
| | | EEDERKIRRIGVRFSKFIEAIGLDKFFDT | |
| 76 | D-DNA | Phosphate-AGCGGCTCTTCGATGGCAGATATGGCAAAACCGAAT | MJ_1_101_DD |
| 77 | D-DNA | Phosphate-AGCGGCTCTTCGGCACAGTTTATTAATGCCCAGTTT | MJ_1_102_DD |
| 78 | Protein | ADMAKPNGIKVIDDEEVKRLIRELDIADVPGIGNITAEKLKKLGINKL-thioester | Dpo4 fragment |
| | | | 155-202 |
| 79 | D-DNA | TCTAATACGACTCACTATAGGAGCTCAGACTGGCACGC | DE4.40T7 |
| 80 | D-DNA | GTGGAACCGACAACTTGTGC | DE4.40R |
| 81 | Protein | H-RTFPHGISKETAYSESVKLLQKILEEDERKIRRIGVRFSKFIEAIGLDKFFDT-NH₂ | example 11 |
| | | | product(1) |
| 82 | Protein | Boc-VDTLSIEFDKLKGMIGEAKAKYLISLARDEYNEPIRTRVRKSIGRIVTMKRNSRNLE | example 11 |
| | | EIKPYLFRAIEESYYKLDKRIPKAIHVVAVTEDLDIVSRG-OH | product(2) |
| 83 | Protein | H-VDTLSIEFDKLKGMIGEAKAKYLISLARDEYNEPIRTRVRKSIGRIVTMKRNSRNLEE | example 11 |
| | | IKPYLFRAIEESYYKLDKRIPKAIHVVAVTEDLDIVSRGRTFPHGISKETAYSESVKLLQ | product (3) |
| | | KILEEDERKIRRIGVRFSKFIEAIGLDKFFDT-NH₂ | |
| 84 | Protein | Z-CDMAKPNGIKVIDDEEVKRLIRELDIADVPGIGNITAEKLKKLGINKL-benzyl- | example 11 |
| | | thioester | product (4) |
| 85 | Protein | H-RKEVYQQVSSRIMNLLREYSEKIEIASIDEAYLDISDKVRDYREAYNLGLEIKNKILE | example 11 |
| | | KEKITVTVGISKNKVFAKIA-SMe | product (7) |
| 86 | Protein | Ac-MIVLFVDFDYFYAQVEEVLNPSLKGKPVVVCVFSGRFEDSGAVATANYEARKFGV | example 11 |
| | | KAGIPIVEAKKILPNAVYLPM-OGp | product (6) |
| 87 | Protein | H-CDMAKPNGIKVIDDEEVKRLIRELDIADVPGIGNITAEKLKKLGINKLCDTLSIEFDKL | example 11 |
| | | KGMIGEAKAKYLISLARDEYNEPIRTRVRKSIGRIVTMKRNSRNLEEIKPYLFRAIEESY | product (5) |
| | | YKLDKRIPKAIHVVAVTEDLDIVSRGRTFPHGISKETAYSESVKLLQKILEEDERKIRRIG | |
| | | VRFSKFIEAIGLDKFFDT-OH | |
| 88 | Protein | Ac-MIVLFVDFDYFYAQVEEVLNPSLKGKPVVVCVFSGRFEDSGAVATANYEARKFGV | example 11 |
| | | KAGIPIVEAKKILPNAVYLPMRKEVYQQVSSRIMNLLREYSEKIEIASIDEAYLDISDKV | product (8) |
| | | RDYREAYNLGLEIKNKILEKEKITVTVGISKNKVFAKIA-SMe | |
| 89 | Protein | MIVLFVDFDYFYAQVEEVLNPSLKGKPVVVCVFSGRFEDSGAVATANYEARKFGVKA | Dpo4 A71C, |
| | | GIPIVEAKKILPN [symbol] VYLPMRKEVYQQVSSRIMNLLREYSEKIEIASIDEAYLDISDKVRD | polymerase Dpo4 |
| | | YREAYNLGLEIKNKILEKEKITVTVGISKNKVFAKIAADMAKPNGIKVIDDEEVKRLIRE | variant A71C |
| | | LDIADVPGIGNITAEKLKKLGINKLVDTLSIEFDKLKGMIGEAKAKYLISLARDEYNEPI | |
| | | RTRVRKSIGRIVTMKRNSRNLEEIKPYLFRAIEESYYKLDKRIPKAIHVVAVTEDLDIVS | |
| | | RGRTFPHGISKETAYSESVKLLQKILEEDERKIRRIGVRFSKFIEAIGLDKFFDT | |
| 90 | Protein | MIVLFVDFDYFYAQVEEVLNPSLKGKPVVVCVFSGRFEDSGAVATANYEARKFGVKA | Dpo4 M76G, |
| | | GIPIVEAKKILPNAVYLP [symbol] GRKEVYQQVSSRIMNLLREYSEKIEIASIDEAYLDISDKVRDY | polymerase Dpo4 |
| | | REAYNLGLEIKNKILEKEKITVTVGISKNKVFAKIAADMAKPNGIKVIDDEEVKRLIREL | variant M76G |
| | | DIADVPGIGNITAEKLKKLGINKLVDTLSIEFDKLKGMIGEAKAKYLISLARDEYNEPIR | |
| | | TRVRKSIGRIVTMKRNSRNLEEIKPYLFRAIEESYYKLDKRIPKAIHVVAVTEDLDIVSR | |
| | | GRTFPHGISKETAYSESVKLLQKILEEDERKIRRIGVRFSKFIEAIGLDKFFDT | |
| 91 | Protein | MIVLFVDFDYFYAQVEEVLNPSLKGKPVVVCVFSGRFEDSGAVATANYEARKFGVKA | Dpo4 M76A, |
| | | GIPIVEAKKILPNAVYLP [symbol] RKEVYQQVSSRIMNLLREYSEKIEIASIDEAYLDISDKVRDY | polymerase Dpo4 |
| | | REAYNLGLEIKNKILEKEKITVTVGISKNKVFAKIAADMAKPNGIKVIDDEEVKRLIREL | variant M76A |
| | | DIADVPGIGNITAEKLKKLGINKLVDTLSIEFDKLKGMIGEAKAKYLISLARDEYNEPIR | |
| | | TRVRKSIGRIVTMKRNSRNLEEIKPYLFRAIEESYYKLDKRIPKAIHVVAVTEDLDIVSR | |
| | | GRTFPHGISKETAYSESVKLLQKILEEDERKIRRIGVRFSKFIEAIGLDKFFDT | |
| 92 | Protein | MIVLFVDFDYFYAQVEEVLNPSLKGKPVVVCVFSGRFEDSGAVATANYEARKFGVKA | Dpo4 I67C, |
| | | GIPIVEAKK [symbol] LPNAVYLPMRKEVYQQVSSRIMNLLREYSEKIEIASIDEAYLDISDKVRD | polymerase Dpo4 |
| | | YREAYNLGLEIKNKILEKEKITVTVGISKNKVFAKIAADMAKPNGIKVIDDEEVKRLIRE | variant I67C |
| | | LDIADVPGIGNITAEKLKKLGINKLVDTLSIEFDKLKGMIGEAKAKYLISLARDEYNEPI | |
| | | RTRVRKSIGRIVTMKRNSRNLEEIKPYLFRAIEESYYKLDKRIPKAIHVVAVTEDLDIVS | |
| | | RGRTFPHGISKETAYSESVKLLQKILEEDERKIRRIGVRFSKFIEAIGLDKFFDT | |
| 93 | Protein | MIVLFVDFDYFYAQVEEVLNPSLKGKPVVVCVFSGRFEDSGAVATANYEARKFGVKA | Dpo4 S86G, |
| | | GIPIVEAKKILPNAVYLPMRKEVYQQVS [symbol] RIMNLLREYSEKIEIASIDEAYLDISDKVRD | polymerase Dpo4 |
| | | YREAYNLGLEIKNKILEKEKITVTVGISKNKVFAKIAADMAKPNGIKVIDDEEVKRLIRE | variant S86G |
| | | LDIADVPGIGNITAEKLKKLGINKLVDTLSIEFDKLKGMIGEAKAKYLISLARDEYNEPI | |
| | | RTRVRKSIGRIVTMKRNSRNLEEIKPYLFRAIEESYYKLDKRIPKAIHVVAVTEDLDIVS | |
| | | RGRTFPHGISKETAYSESVKLLQKILEEDERKIRRIGVRFSKFIEAIGLDKFFDT | |
| 94 | Protein | MIVLFVDFDYFYAQVEEVLNPSLKGKPVVVCVFSGRFEDSGAVATANYEARKFGVKA | Dpo4 |
| | | GIPIVEAKKILPN [symbol] VYLPMRKEVYQQVSSRIMNLLREYSEKIEIASIDEAYLDISDKVRD | A71C/A155C/V203C, |
| | | YREAYNLGLEIKNKILEKEKITVTVGISKNKVFAKIACDMAKPNGIKVIDDEEVKRLIRE | polymerase Dpo4 |
| | | LDIADVPGIGNITAEKLKKLGINKL [symbol] DTLSIEFDKLKGMIGEAKAKYLISLARDEYNEPI | variant |
| | | RTRVRKSIGRIVTMKRNSRNLEEIKPYLFRAIEESYYKLDKRIPKAIHVVAVTEDLDIVS | A71C/A155/V203C |
| | | RGRTFPHGISKETAYSESVKLLQKILEEDERKIRRIGVRFSKFIEAIGLDKFFDT | |
| 95 | Protein | MIVLFVDFDYFYAQVEEVLNPSLKGKPVVVCVFSGRFEDSGAVATANYEARKFGVKA | Dpo4 |
| | | GIPIVEAKKILPNAVYLPMRKEVYQQVS [symbol] RIMNLLREYSEKIEIASIDEAYLDISDKVRD | S86C/A155C/V203C, |
| | | YREAYNLGLEIKNKILEKEKITVTVGISKNKVFAKIA [symbol] DMAKPNGIKVIDDEEVKRLIRE | polymerase Dpo4 |
| | | LDIADVPGIGNITAEKLKKLGINKL [symbol] DTLSIEFDKLKGMIGEAKAKYLISLARDEYNEPI | variant |
| | | RTRVRKSIGRIVTMKRNSRNLEEIKPYLFRAIEESYYKLDKRIPKAIHVVAVTEDLDIVS | S86C/A155C/V203C, |
| | | RGRTFPHGISKETAYSESVKLLQKILEEDERKIRRIGVRFSKFIEAIGLDKFFDT | |
| 96 | Protein | MIVLFVDFDYFYAQVEEVLNPSLKGKPVVVSVFSGRFEDSGAVATANYEARKFGVKA | Dpo4 |
| | | GIPIVEAKKILPNAVYLPMRKEVYQQVSSRIMNLLREYSEKIEIASIDEAYLDISDKVRD | C31S/A155C/V203C, |
| | | YREAYNLGLEIKNKILEKEKITVTVGISKNKVFAKI [symbol] CDMAKPNGIKVIDDEEVKRLIRE | polymerase Dpo4 |
| | | LDIADVPGIGNITAEKLKKLGINKL [symbol] DTLSIEFDKLKGMIGEAKAKYLISLARDEYNEPI | variant |
| | | RTRVRKSIGRIVTMKRNSRNLEEIKPYLFRAIEESYYKLDKRIPKAIHVVAVTEDLDIVS | C31S/A155C/V203C, |
| | | RGRTFPHGISKETAYSESVKLLQKILEEDERKIRRIGVRFSKFIEAIGLDKFFDT | |
| 97 | Protein | MIVLFVDFDYFYAQVEEVLNPSLKGKPVVVCVFSGRFEDSGAVATANYEARKFGVKA | Dpo4 |
| | | GIPIVEAKKILPNAVYLP [symbol] RKEVYQQVSSRIMNLLREYSEKIEIASIDEAYLDISDKVRDY | M76G/A155C/V203C, |
| | | REAYNLGLEIKNKILEKEKITVTVGISKNKVFAKIA [symbol] DMAKPNGIKVIDDEEVKRLIREL | polymerase Dpo4 |
| | | DIADVPGIGNITAEKLKKLGINKL [symbol] DTLSIEFDKLKGMIGEAKAKYLISLARDEYNEPIR | variant |
| | | TRVRKSIGRIVTMKRNSRNLEEIKPYLFRAIEESYYKLDKRIPKAIHVVAVTEDLDIVSR | M76G/A155C/V203C, |
| | | GRTFPHGISKETAYSESVKLLQKILEEDERKIRRIGVRFSKFIEAIGLDKFFDT | |
| 98 | Protein | MIVLFVDFDYFYAQVEEVLNPSLKGKPVVVCVFSGRFEDSGAVATANYEARKFGVKA | Dpo4 |
| | | GIPIVEAKKILPNAVYLP [symbol] RKEVYQQVSSRIMNLLREYSEKIEIASIDEAYLDISDKVRDY | M76A/A155C/V203C, |
| | | REAYNLGLEIKNKILEKEKITVTVGISKNKVFAKIA [symbol] DMAKPNGIKVIDDEEVKRLIREL | polymerase Dpo4 |
| | | DIADVPGIGNITAEKLKKLGINKL [symbol] DTLSIEFDKLKGMIGEAKAKYLISLARDEYNEPIR | variant |
| | | TRVRKSIGRIVTMKRNSRNLEEIKPYLFRAIEESYYKLDKRIPKAIHVVAVTEDLDIVSR | M76A/A155C/V203C |
| | | GRTFPHGISKETAYSESVKLLQKILEEDERKIRRIGVRFSKFIEAIGLDKFFDT | |
| 99 | Protein | MIVLFVDFDYFYAQVEEVLNPSLKGKPVVVCVFSGRFEDSGAVATANYEARKFGVKA | Dpo4 |
| | | GIPIVEAKK [symbol] LPNAVYLPMRKEVYQQVSSRIMNLLREYSEKIEIASIDEAYLDISDKVRD | I67C/A155C/V203C, |
| | | YREAYNLGLEIKNKILEKEKITVTVGISKNKVFAKIA [symbol] DMAKPNGIKVIDDEEVKRLIRE | polymerase Dpo4 |
| | | LDIADVPGIGNITAEKLKKLGINKL [symbol] DTLSIEFDKLKGMIGEAKAKYLISLARDEYNEPI | variant |
| | | RTRVRKSIGRIVTMKRNSRNLEEIKPYLFRAIEESYYKLDKRIPKAIHVVAVTEDLDIVS | I67C/A155C/V203C |
| | | RGRTFPHGISKETAYSESVKLLQKILEEDERKIRRIGVRFSKFIEAIGLDKFFDT | |
| 100 | Protein | MIVLFVDFDYFYAQVEEVLNPSLKGKPVVVCVFSGRFEDSGAVATANYEARKFGVKA | Dpo4 |
| | | GIPIVEAKKILPNAVYLPMRKEVYQQVS [symbol] RIMNLLREYSEKIEIASIDEAYLDISDKVRD | S86G/A155C/V203C, |
| | | YREAYNLGLEIKNKILEKEKITVTVGISKNKVFAKIA [symbol] DMAKPNGIKVIDDEEVKRLIRE | polymerase Dpo4 |
| | | LDIADVPGIGNITAEKLKKLGINKL [symbol] DTLSIEFDKLKGMIGEAKAKYLISLARDEYNEPI | variant |
| | | RTRVRKSIGRIVTMKRNSRNLEEIKPYLFRAIEESYYKLDKRIPKAIHVVAVTEDLDIVS | S86G/A155C/V203C |
| | | RGRTFPHGISKETAYSESVKLLQKILEEDERKIRRIGVRFSKFIEAIGLDKFFDT | |
| 101 | Protein | MIVLFVDFDYFYAQVEEVLNPSLKGKPVVVCVFSGRFEDSGAVATANYEARKFGVKA | Dpo4 |
| | | GIPIVEAKKILPNAVYLPMRKEVYQQVSSRIMNLLREY [symbol] EKIEIASIDEAYLDISDKVRD | S96G/A155C/V203C, |
| | | YREAYNLGLEIKNKILEKEKITVTVGISKNKVFAKIA [symbol] DMAKPNGIKVIDDEEVKRLIRE | polymerase Dpo4 |
| | | LDIADVPGIGNITAEKLKKLGINKL [symbol] DTLSIEFDKLKGMIGEAKAKYLISLARDEYNEPI | variant |
| | | RTRVRKSIGRIVTMKRNSRNLEEIKPYLFRAIEESYYKLDKRIPKAIHVVAVTEDLDIVS | S96G/A155C/V203C |
| | | RGRTFPHGISKETAYSESVKLLQKILEEDERKIRRIGVRFSKFIEAIGLDKFFDT | |
| 102 | Protein | MIVLFVDFDYFYAQVEEVLNPSLKGKPVVVCVFSGRFEDSGAVATANYEARKFGVKA | Dpo4 A71C/A155C, |
| | | GIPIVEAKKILPNCVYLPMRKEVYQQVSSRIMNLLREYSEKIEIASIDEAYLDISDKVRD | polymerase Dpo4 |
| | | YREAYNLGLEIKNKILEKEKITVTVGISKNKVFAKIACDMAKPNGIKVIDDEEVKRLIRE | variant A71C/A155C |
| | | LDIADVPGIGNITAEKLKKLGINKLVDTLSIEFDKLKGMIGEAKAKYLISLARDEYNEPI | |
| | | RTRVRKSIGRIVTMKRNSRNLEEIKPYLFRAIEESYYKLDKRIPKAIHVVAVTEDLDIVS | |
| | | RGRTFPHGISKETAYSESVKLLQKILEEDERKIRRIGVRFSKFIEAIGLDKFFDT | |
| 103 | Protein | MIVLFVDFDYFYAQVEEVLNPSLKGKPVVVCVFSGRFEDSGAVATANYEARKFGVKA | Dpo4 S86C/A155C/, |
| | | GIPIVEAKKILPNAVYLPMRKEVYQQVSCRIMNLLREYSEKIEIASIDEAYLDISDKVRD | polymerase Dpo4 |
| | | YREAYNLGLEIKNKILEKEKITVTVGISKNKVFAKIACDMAKPNGIKVIDDEEVKRLIRE | variant S86C/A155C, |
| | | LDIADVPGIGNITAEKLKKLGINKLVDTLSIEFDKLKGMIGEAKAKYLISLARDEYNEPI | |
| | | RTRVRKSIGRIVTMKRNSRNLEEIKPYLFRAIEESYYKLDKRIPKAIHVVAVTEDLDIVS | |
| | | RGRTFPHGISKETAYSESVKLLQKILEEDERKIRRIGVRFSKFIEAIGLDKFFDT | |
| 104 | Protein | MIVLFVDFDYFYAQVEEVLNPSLKGKPVVVSVFSGRFEDSGAVATANYEARKFGVKA | Dpo4 C31S/A155C, |
| | | GIPIVEAKKILPNAVYLPMRKEVYQQVSSRIMNLLREYSEKIEIASIDEAYLDISDKVRD | polymerase Dpo4 |
| | | YREAYNLGLEIKNKILEKEKITVTVGISKNKVFAKIACDMAKPNGIKVIDDEEVKRLIRE | variant C31S/A155C, |
| | | LDIADVPGIGNITAEKLKKLGINKLVDTLSIEFDKLKGMIGEAKAKYLISLARDEYNEPI | |
| | | RTRVRKSIGRIVTMKRNSRNLEEIKPYLFRAIEESYYKLDKRIPKAIHVVAVTEDLDIVS | |
| | | RGRTFPHGISKETAYSESVKLLQKILEEDERKIRRIGVRFSKFIEAIGLDKFFDT | |
| 105 | Protein | MIVLFVDFDYFYAQVEEVLNPSLKGKPVVVCVFSGRFEDSGAVATANYEARKFGVKA | Dpo4 M76G/A155C, |
| | | GIPIVEAKKILPNAVYLPGRKEVYQQVSSRIMNLLREYSEKIEIASIDEAYLDISDKVRDY | polymerase Dpo4 |
| | | REAYNLGLEIKNKILEKEKITVTVGISKNKVFAKIACDMAKPNGIKVIDDEEVKRLIREL | variant |
| | | DIADVPGIGNITAEKLKKLGINKLVDTLSIEFDKLKGMIGEAKAKYLISLARDEYNEPIR | M76G/A155C, |
| | | TRVRKSIGRIVTMKRNSRNLEEIKPYLFRAIEESYYKLDKRIPKAIHVVAVTEDLDIVSR | |
| | | GRTFPHGISKETAYSESVKLLQKILEEDERKIRRIGVRFSKFIEAIGLDKFFDT | |
| 106 | Protein | MIVLFVDFDYFYAQVEEVLNPSLKGKPVVVCVFSGRFEDSGAVATANYEARKFGVKA | Dpo4 M76A/A155C, |
| | | GIPIVEAKKILPNAVYLPARKEVYQQVSSRIMNLLREYSEKIEIASIDEAYLDISDKVRDY | polymerase Dpo4 |
| | | REAYNLGLEIKNKILEKEKITVTVGISKNKVFAKIACDMAKPNGIKVIDDEEVKRLIREL | variant M76A/A155C |
| | | DIADVPGIGNITAEKLKKLGINKLVDTLSIEFDKLKGMIGEAKAKYLISLARDEYNEPIR | |
| | | TRVRKSIGRIVTMKRNSRNLEEIKPYLFRAIEESYYKLDKRIPKAIHVVAVTEDLDIVSR | |
| | | GRTFPHGISKETAYSESVKLLQKILEEDERKIRRIGVRFSKFIEAIGLDKFFDT | |
| 107 | Protein | MIVLFVDFDYFYAQVEEVLNPSLKGKPVVVCVFSGRFEDSGAVATANYEARKFGVKA | Dpo4 I67C/A155C, |
| | | GIPIVEAKKCLPNAVYLPMRKEVYQQVSSRIMNLLREYSEKIEIASIDEAYLDISDKVRD | polymerase Dpo4 |
| | | YREAYNLGLEIKNKILEKEKITVTVGISKNKVFAKIACDMAKPNGIKVIDDEEVKRLIRE | variant I67C/A155C |
| | | LDIADVPGIGNITAEKLKKLGINKLVDTLSIEFDKLKGMIGEAKAKYLISLARDEYNEPI | |
| | | RTRVRKSIGRIVTMKRNSRNLEEIKPYLFRAIEESYYKLDKRIPKAIHVVAVTEDLDIVS | |
| | | RGRTFPHGISKETAYSESVKLLQKILEEDERKIRRIGVRFSKFIEAIGLDKFFDT | |
| 108 | Protein | MIVLFVDFDYFYAQVEEVLNPSLKGKPVVVCVFSGRFEDSGAVATANYEARKFGVKA | Dpo4 S86G/A155C, |
| | | GIPIVEAKKILPNAVYLPMRKEVYQQVSGRIMNLLREYSEKIEIASIDEAYLDISDKVRD | polymerase Dpo4 |
| | | YREAYNLGLEIKNKILEKEKITVTVGISKNKVFAKIACDMAKPNGIKVIDDEEVKRLIRE | variant S86G/A155C |
| | | LDIADVPGIGNITAEKLKKLGINKLVDTLSIEFDKLKGMIGEAKAKYLISLARDEYNEPI | |
| | | RTRVRKSIGRIVTMKRNSRNLEEIKPYLFRAIEESYYKLDKRIPKAIHVVAVTEDLDIVS | |
| | | RGRTFPHGISKETAYSESVKLLQKILEEDERKIRRIGVRFSKFIEAIGLDKFFDT | |
| 109 | Protein | MIVLFVDFDYFYAQVEEVLNPSLKGKPVVVCVFSGRFEDSGAVATANYEARKFGVKA | Dpo4 S96G/A155C, |
| | | GIPIVEAKKILPNAVYLPMRKEVYQQVSSRIMNLLREYGEKIEIASIDEAYLDISDKVRD | polymerase Dpo4 |
| | | YREAYNLGLEIKNKILEKEKITVTVGISKNKVFAKIACDMAKPNGIKVIDDEEVKRLIRE | variant S96G/A155C |
| | | LDIADVPGIGNITAEKLKKLGINKLVDTLSIEFDKLKGMIGEAKAKYLISLARDEYNEPI | |
| | | RTRVRKSIGRIVTMKRNSRNLEEIKPYLFRAIEESYYKLDKRIPKAIHVVAVTEDLDIVS | |
| | | RGRTFPHGISKETAYSESVKLLQKILEEDERKIRRIGVRFSKFIEAIGLDKFFDT | |
| 110 | Protein | MIVLFVDFDYFYAQVEEVLNPSLKGKPVVVCVFSGRFEDSGAVATANYEARKFGVKA | Dpo4 A71C/V203C, |
| | | GIPIVEAKKILPNCVYLPMRKEVYQQVSSRIMNLLREYSEKIEIASIDEAYLDISDKVRD | polymerase Dpo4 |
| | | YREAYNLGLEIKNKILEKEKITVTVGISKNKVFAKIAADMAKPNGIKVIDDEEVKRLIRE | variant A71C/V203C |
| | | LDIADVPGIGNITAEKLKKLGINKLCDTLSIEFDKLKGMIGEAKAKYLISLARDEYNEPI | |
| | | RTRVRKSIGRIVTMKRNSRNLEEIKPYLFRAIEESYYKLDKRIPKAIHVVAVTEDLDIVS | |
| | | RGRTFPHGISKETAYSESVKLLQKILEEDERKIRRIGVRFSKFIEAIGLDKFFDT | |
| 111 | Protein | MIVLFVDFDYFYAQVEEVLNPSLKGKPVVVCVFSGRFEDSGAVATANYEARKFGVKA | Dpo4 S86C/V203C, |
| | | GIPIVEAKKILPNAVYLPMRKEVYQQVSCRIMNLLREYSEKIEIASIDEAYLDISDKVRD | polymerase Dpo4 |
| | | YREAYNLGLEIKNKILEKEKITVTVGISKNKVFAKIAADMAKPNGIKVIDDEEVKRLIRE | variant S86C/V203C, |
| | | LDIADVPGIGNITAEKLKKLGINKLCDTLSIEFDKLKGMIGEAKAKYLISLARDEYNEPI | |
| | | RTRVRKSIGRIVTMKRNSRNLEEIKPYLFRAIEESYYKLDKRIPKAIHVVAVTEDLDIVS | |
| | | RGRTFPHGISKETAYSESVKLLQKILEEDERKIRRIGVRFSKFIEAIGLDKFFDT | |
| 112 | Protein | MIVLFVDFDYFYAQVEEVLNPSLKGKPVVVSVFSGRFEDSGAVATANYEARKFGVKA | Dpo4 C31S/V203C, |
| | | GIPIVEAKKILPNAVYLPMRKEVYQQVSSRIMNLLREYSEKIEIASIDEAYLDISDKVRD | polymerase Dpo4 |
| | | YREAYNLGLEIKNKILEKEKITVTVGISKNKVFAKIAADMAKPNGIKVIDDEEVKRLIRE | variant C31S/V203C, |
| | | LDIADVPGIGNITAEKLKKLGINKLCDTLSIEFDKLKGMIGEAKAKYLISLARDEYNEPI | |
| | | RTRVRKSIGRIVTMKRNSRNLEEIKPYLFRAIEESYYKLDKRIPKAIHVVAVTEDLDIVS | |
| | | RGRTFPHGISKETAYSESVKLLQKILEEDERKIRRIGVRFSKFIEAIGLDKFFDT | |
| 113 | Protein | MIVLFVDFDYFYAQVEEVLNPSLKGKPVVVCVFSGRFEDSGAVATANYEARKFGVKA | Dpo4 M76G/V203C, |
| | | GIPIVEAKKILPNAVYLPGRKEVYQQVSSRIMNLLREYSEKIEIASIDEAYLDISDKVRDY | polymerase Dpo4 |
| | | REAYNLGLEIKNKILEKEKITVTVGISKNKVFAKIAADMAKPNGIKVIDDEEVKRLIREL | variant |
| | | DIADVPGIGNITAEKLKKLGINKLCDTLSIEFDKLKGMIGEAKAKYLISLARDEYNEPIR | M76G/V203C, |
| | | TRVRKSIGRIVTMKRNSRNLEEIKPYLFRAIEESYYKLDKRIPKAIHVVAVTEDLDIVSR | |
| | | GRTFPHGISKETAYSESVKLLQKILEEDERKIRRIGVRFSKFIEAIGLDKFFDT | |
| 114 | Protein | MIVLFVDFDYFYAQVEEVLNPSLKGKPVVVCVFSGRFEDSGAVATANYEARKFGVKA | Dpo4 M76A/V203C, |
| | | GIPIVEAKKILPNAVYLPARKEVYQQVSSRIMNLLREYSEKIEIASIDEAYLDISDKVRDY | polymerase Dpo4 |
| | | REAYNLGLEIKNKILEKEKITVTVGISKNKVFAKIAADMAKPNGIKVIDDEEVKRLIREL | variant M76A/V203C |
| | | DIADVPGIGNITAEKLKKLGINKLCDTLSIEFDKLKGMIGEAKAKYLISLARDEYNEPIR | |
| | | TRVRKSIGRIVTMKRNSRNLEEIKPYLFRAIEESYYKLDKRIPKAIHVVAVTEDLDIVSR | |
| | | GRTFPHGISKETAYSESVKLLQKILEEDERKIRRIGVRFSKFIEAIGLDKFFDT | |
| 115 | Protein | MIVLFVDFDYFYAQVEEVLNPSLKGKPVVVCVFSGRFEDSGAVATANYEARKFGVKA | Dpo4 I67C/V203C, |
| | | GIPIVEAKKCLPNAVYLPMRKEVYQQVSSRIMNLLREYSEKIEIASIDEAYLDISDKVRD | polymerase Dpo4 |
| | | YREAYNLGLEIKNKILEKEKITVTVGISKNKVFAKIAADMAKPNGIKVIDDEEVKRLIRE | variant I67C/V203C |
| | | LDIADVPGIGNITAEKLKKLGINKLCDTLSIEFDKLKGMIGEAKAKYLISLARDEYNEPI | |
| | | RTRVRKSIGRIVTMKRNSRNLEEIKPYLFRAIEESYYKLDKRIPKAIHVVAVTEDLDIVS | |
| | | RGRTFPHGISKETAYSESVKLLQKILEEDERKIRRIGVRFSKFIEAIGLDKFFDT | |
| 116 | Protein | MIVLFVDFDYFYAQVEEVLNPSLKGKPVVVCVFSGRFEDSGAVATANYEARKFGVKA | Dpo4 S86G/V203C, |
| | | GIPIVEAKKILPNAVYLPMRKEVYQQVSGRIMNLLREYSEKIEIASIDEAYLDISDKVRD | polymerase Dpo4 |
| | | YREAYNLGLEIKNKILEKEKITVTVGISKNKVFAKIAADMAKPNGIKVIDDEEVKRLIRE | variant S86G/V203C |
| | | LDIADVPGIGNITAEKLKKLGINKLCDTLSIEFDKLKGMIGEAKAKYLISLARDEYNEPI | |
| | | RTRVRKSIGRIVTMKRNSRNLEEIKPYLFRAIEESYYKLDKRIPKAIHVVAVTEDLDIVS | |
| | | RGRTFPHGISKETAYSESVKLLQKILEEDERKIRRIGVRFSKFIEAIGLDKFFDT | |
| 117 | Protein | MIVLFVDFDYFYAQVEEVLNPSLKGKPVVVCVFSGRFEDSGAVATANYEARKFGVKA | Dpo4 S96G/V203C, |
| | | GIPIVEAKKILPNAVYLPMRKEVYQQVSSRIMNLLREYGEKIEIASIDEAYLDISDKVRD | polymerase Dpo4 |
| | | YREAYNLGLEIKNKILEKEKITVTVGISKNKVFAKIAADMAKPNGIKVIDDEEVKRLIRE | variant S96G/V203C |
| | | LDIADVPGIGNITAEKLKKLGINKLCDTLSIEFDKLKGMIGEAKAKYLISLARDEYNEPI | |
| | | RTRVRKSIGRIVTMKRNSRNLEEIKPYLFRAIEESYYKLDKRIPKAIHVVAVTEDLDIVS | |
| | | RGRTFPHGISKETAYSESVKLLQKILEEDERKIRRIGVRFSKFIEAIGLDKFFDT | |
| 118 | Protein | MIVLFVDFDYFYAQVEEVLNPSLKGKPVVVSVFSGRFEDSGAVATANYEARKFGVKA | Dpo4 C31S/A155C, |
| | | GIPIVEAKKILPNAVYLPMRKEVYQQVSSRIMNLLREYSEKIEIASIDEAYLDISDKVRD | polymerase Dpo4 |
| | | YREAYNLGLEIKNKILEKEKITVTVGISKNKVFAKIACDMAKPNGIKVIDDEEVKRLIRE | variant C31S/A155C, |
| | | LDIADVPGIGNITAEKLKKLGINKLVDTLSIEFDKLKGMIGEAKAKYLISLARDEYNEPI | |
| | | RTRVRKSIGRIVTMKRNSRNLEEIKPYLFRAIEESYYKLDKRIPKAIHVVAVTEDLDIVS | |
| | | RGRTFPHGISKETAYSESVKLLQKILEEDERKIRRIGVRFSKFIEAIGLDKFFDT | |
| 119 | Protein | MIVLFVDFDYFYAQVEEVLNPSLKGKPVVVSVFSGRFEDSGAVATANYEARKFGVKA | Dpo4 C31S/V203C, |
| | | GIPIVEAKKILPNAVYLPMRKEVYQQVSSRIMNLLREYSEKIEIASIDEAYLDISDKVRD | polymerase Dpo4 |
| | | YREAYNLGLEIKNKILEKEKITVTVGISKNKVFAKIAADMAKPNGIKVIDDEEVKRLIRE | variant C31S/V203C, |
| | | LDIADVPGIGNITAEKLKKLGINKLCDTLSIEFDKLKGMIGEAKAKYLISLARDEYNEPI | |
| | | RTRVRKSIGRIVTMKRNSRNLEEIKPYLFRAIEESYYKLDKRIPKAIHVVAVTEDLDIVS | |
| | | RGRTFPHGISKETAYSESVKLLQKILEEDERKIRRIGVRFSKFIEAIGLDKFFDT | |
| 120 | Protein | MIVLFVDFDYFYAQVEEVLNPSLKGKPVVVSVFSGRFEDSGAVATANYEARKFGVKA | Dpo4 |
| | | GIPIVEAKKILPNAVYLPMRKEVYQQVSSRIMNLLREYSEKIEIASIDEAYLDISDKVRD | C31S/A155C/V203C, |
| | | YREAYNLGLEIKNKILEKEKITVTVGISKNKVFAKIACDMAKPNGIKVIDDEEVKRLIRE | polymerase Dpo4 |
| | | LDIADVPGIGNITAEKLKKLGINKLCDTLSIEFDKLKGMIGEAKAKYLISLARDEYNEPI | variant |
| | | RTRVRKSIGRIVTMKRNSRNLEEIKPYLFRAIEESYYKLDKRIPKAIHVVAVTEDLDIVS | C31S/A155C/V203C, |
| | | RGRTFPHGISKETAYSESVKLLQKILEEDERKIRRIGVRFSKFIEAIGLDKFFDT | |
| 121 | Protein | MIVLFVDFDYFYAQVEEVLNPSLKGKPVVVCVFSGRFEDSGAVATANYEARKFGVKA | Dpo4-Δ3, polymerase |
| | | GIPIVEAKKILPNAVYLPMRKEVYQQVSSRIMNLLREYSEKIEIASIDEAYLDISDKVRD | Dpo4-Δ3 |
| | | YREAYNLGLEIKNKILEKEKITVTVGISKNKVFAKIAADMAKPNGIKVIDDEEVKRLIRE | |
| | | LDIADVPGIGNITAEKLKKLGINKLVDTLSIEFDKLKGMIGEAKAKYLISLARDEYNEPI | |
| | | RTRVRKSIGRIVTMKRNSRNLEEIKPYLFRAIEESYYKLDKRIPKAIHVVAVTEDLDIVS | |
| | | RGRTFPHGISKETAYSESVKLLQKILEEDERKIRRIGVRFSKFIEAIGLDKF | |
| 122 | Protein | MIVLFVDFDYFYAQVEEVLNPSLKGKPVVVCVFSGRFEDSGAVATANYEARKFGVKA | Dpo4-Δ3 A155C, |
| | | GIPIVEAKKILPNAVYLPMRKEVYQQVSSRIMNLLREYSEKIEIASIDEAYLDISDKVRD | polymerase Dpo4-Δ3 |
| | | YREAYNLGLEIKNKILEKEKITVTVGISKNKVFAKIACDMAKPNGIKVIDDEEVKRLIRE | variant A155C |
| | | LDIADVPGIGNITAEKLKKLGINKLVDTLSIEFDKLKGMIGEAKAKYLISLARDEYNEPI | |
| | | RTRVRKSIGRIVTMKRNSRNLEEIKPYLFRAIEESYYKLDKRIPKAIHVVAVTEDLDIVS | |
| | | RGRTFPHGISKETAYSESVKLLQKILEEDERKIRRIGVRFSKFIEAIGLDKF | |
| 123 | Protein | MIVLFVDFDYFYAQVEEVLNPSLKGKPVVVCVFSGRFEDSGAVATANYEARKFGVKA | Dpo4-Δ3 |
| | | GIPIVEAKKILPNCVYLPMRKEVYQQVSSRIMNLLREYSEKIEIASIDEAYLDISDKVRD | A71C/A155C, |
| | | YREAYNLGLEIKNKILEKEKITVTVGISKNKVFAKIACDMAKPNGIKVIDDEEVKRLIRE | polymerase Dpo4-Δ3 |
| | | LDIADVPGIGNITAEKLKKLGINKLVDTLSIEFDKLKGMIGEAKAKYLISLARDEYNEPI | variant A71C/A155C |
| | | RTRVRKSIGRIVTMKRNSRNLEEIKPYLFRAIEESYYKLDKRIPKATHVVAVTEDLDIVS | |
| | | RGRTFPHGISKETAYSESVKLLQKILEEDERKIRRIGVRFSKFIEAIGLDKF | |
| 124 | Protein | MIVLFVDFDYFYAQVEEVLNPSLKGKPVVVCVFSGRFEDSGAVATANYEARKFGVKA | Dpo4-Δ3 V203C, |
| | | GIPIVEAKKILPNAVYLPMRKEVYQQVSSRIMNLLREYSEKIEIASIDEAYLDISDKVRD | polymerase Dpo4-Δ3 |
| | | YREAYNLGLEIKNKILEKEKITVTVGISKNKVFAKIAADMAKPNGIKVIDDEEVKRLIRE | variant V203C, |
| | | LDIADVPGIGNITAEKLKKLGINKLCDTLSIEFDKLKGMIGEAKAKYLISLARDEYNEPI | |
| | | RTRVRKSIGRIVTMKRNSRNLEEIKPYLFRAIEESYYKLDKRIPKAIHVVAVTEDLDIVS | |
| | | RGRTFPHGISKETAYSESVKLLQKILEEDERKIRRIGVRFSKFIEAIGLDKF | |
| 125 | Protein | MIVLFVDFDYFYAQVEEVLNPSLKGKPVVVCVFSGRFEDSGAVATANYEARKFGVKA | Dpo4-Δ3 |
| | | GIPIVEAKKILPNAVYLPMRKEVYQQVSSRIMNLLREYSEKIEIASIDEAYLDISDKVRD | A155C/V203C, |
| | | YREAYNLGLEIKNKILEKEKITVTVGISKNKVFAKIACDMAKPNGIKVIDDEEVKRLIRE | polymerase Dpo4-Δ3 |
| | | LDIADVPGIGNITAEKLKKLGINKLCDTLSIEFDKLKGMIGEAKAKYLISLARDEYNEPI | variant |
| | | RTRVRKSIGRIVTMKRNSRNLEEIKPYLFRAIEESYYKLDKRIPKAIHVVAVTEDLDIVS | A155C/V203C, |
| | | RGRTFPHGISKETAYSESVKLLQKILEEDERKIRRIGVRFSKFIEAIGLDKF | |
| 126 | Protein | MIVLFVDFDYFYAQVEEVLNPSLKGKPVVVSVFSGRFEDSGAVATANYEARKFGVKA | Dpo4-Δ3 C31S, |
| | | GIPIVEAKKILPNAVYLPMRKEVYQQVSSRIMNLLREYSEKIEIASIDEAYLDISDKVRD | polymerase Dpo4-Δ3 |
| | | YREAYNLGLEIKNKILEKEKITVTVGISKNKVFAKIAADMAKPNGIKVIDDEEVKRLIRE | variant C31S, |
| | | LDIADVPGIGNITAEKLKKLGINKLVDTLSIEFDKLKGMIGEAKAKYLISLARDEYNEPI | |
| | | RTRVRKSIGRIVTMKRNSRNLEEIKPYLFRAIEESYYKLDKRIPKAIHVVAVTEDLDIVS | |
| | | RGRTFPHGISKETAYSESVKLLQKILEEDERKIRRIGVRFSKFIEAIGLDKF | |
| 127 | Protein | MIVLFVDFDYFYAQVEEVLNPSLKGKPVVVCVFSGRFEDSGAVATANYEARKFGVKA | Dpo4-Δ3 S85C, |
| | | GIPIVEAKKILPNAVYLPMRKEVYQQVCSRIMNLLREYSEKIEIASIDEAYLDISDKVRD | polymerase Dpo4-Δ3 |
| | | YREAYNLGLEIKNKILEKEKITVTVGISKNKVFAKIAADMAKPNGIKVIDDEEVKRLIRE | variant S85C |
| | | LDIADVPGIGNITAEKLKKLGINKLVDTLSIEFDKLKGMIGEAKAKYLISLARDEYNEPI | |
| | | RTRVRKSIGRIVTMKRNSRNLEEIKPYLFRAIEESYYKLDKRIPKAIHVVAVTEDLDIVS | |
| | | RGRTFPHGISKETAYSESVKLLQKILEEDERKIRRIGVRFSKFIEAIGLDKF | |
| 128 | Protein | MIVLFVDFDYFYAQVEEVLNPSLKGKPVVVCVFSGRFEDSGAVATANYEARKFGVKA | Dpo4-Δ3 S86C, |
| | | GIPIVEAKKILPNAVYLPMRKEVYQQVSCRIMNLLREYSEKIEIASIDEAYLDISDKVRD | polymerase Dpo4-Δ3 |
| | | YREAYNLGLEIKNKILEKEKITVTVGISKNKVFAKIAADMAKPNGIKVIDDEEVKRLIRE | variant S86C |
| | | LDIADVPGIGNITAEKLKKLGINKLVDTLSIEFDKLKGMIGEAKAKYLISLARDEYNEPI | |
| | | RTRVRKSIGRIVTMKRNSRNLEEIKPYLFRAIEESYYKLDKRIPKAIHVVAVTEDLDIVS | |
| | | RGRTFPHGISKETAYSESVKLLQKILEEDERKIRRIGVRFSKFIEAIGLDKF | |
| 129 | Protein | MIVLFVDFDYFYAQVEEVLNPSLKGKPVVVCVFSGRFEDSGAVATANYEARKFGVKA | Dpo4-Δ3 S96C, |
| | | GIPIVEAKKILPNAVYLPMRKEVYQQVSSRIMNLLREYCEKIEIASIDEAYLDISDKVRD | polymerase Dpo4-Δ3 |
| | | YREAYNLGLEIKNKILEKEKITVTVGISKNKVFAKIAADMAKPNGIKVIDDEEVKRLIRE | variant S96C, |
| | | LDIADVPGIGNITAEKLKKLGINKLVDTLSIEFDKLKGMIGEAKAKYLISLARDEYNEPI | |
| | | RTRVRKSIGRIVTMKRNSRNLEEIKPYLFRAIEESYYKLDKRIPKAIHVVAVTEDLDIVS | |
| | | RGRTFPHGISKETAYSESVKLLQKILEEDERKIRRIGVRFSKFIEAIGLDKF | |
| 130 | Protein | MIVLFVDFDYFYAQVEEVLNPSLKGKPVVVCVFSGRFEDSGAVATANYEARKFGVKA | Dpo4-Δ3 A71C, |
| | | GIPIVEAKKILPNCVYLPMRKEVYQQVSSRIMNLLREYSEKIEIASIDEAYLDISDKVRD | polymerase Dpo4-Δ3 |
| | | YREAYNLGLEIKNKILEKEKITVTVGISKNKVFAKIAADMAKPNGIKVIDDEEVKRLIRE | variant A71C |
| | | LDIADVPGIGNITAEKLKKLGINKLVDTLSIEFDKLKGMIGEAKAKYLISLARDEYNEPI | |
| | | RTRVRKSIGRIVTMKRNSRNLEEIKPYLFRAIEESYYKLDKRIPKAIHVVAVTEDLDIVS | |
| | | RGRTEPHGISKETAYSESVKLLQKILEEDERKIRRIGVRFSKFIEAIGLDKE | |
| 131 | Protein | MIVLFVDFDYFYAQVEEVLNPSLKGKPVVVCVFSGRFEDSGAVATANYEARKFGVKA | Dpo4-Δ3 M76G, |
| | | GIPIVEAKKILPNAVYLPGRKEVYQQVSSRIMNLLREYSEKIEIASIDEAYLDISDKVRDY | polymerase Dpo4-Δ3 |
| | | REAYNLGLEIKNKILEKEKITVTVGISKNKVFAKIAADMAKPNGIKVIDDEEVKRLIREL | variant M76G |
| | | DIADVPGIGNITAEKLKKLGINKLVDTLSIEFDKLKGMIGEAKAKYLISLARDEYNEPIR | |
| | | TRVRKSIGRIVTMKRNSRNLEEIKPYLFRAIEESYYKLDKRIPKAIHVVAVTEDLDIVSR | |
| | | GRTFPHGISKETAYSESVKLLQKILEEDERKIRRIGVRESKFIEAIGLDKF | |
| 132 | Protein | MIVLFVDFDYFYAQVEEVLNPSLKGKPVVVCVFSGRFEDSGAVATANYEARKFGVKA | Dpo4-Δ3 M76A, |
| | | GIPIVEAKKILPNAVYLPARKEVYQQVSSRIMNLLREYSEKIEIASIDEAYLDISDKVRDY | polymerase Dpo4-Δ3 |
| | | REAYNLGLEIKNKILEKEKITVTVGISKNKVFAKIAADMAKPNGIKVIDDEEVKRLIREL | variant M76A |
| | | DIADVPGIGNITAEKLKKLGINKLVDTLSIEFDKLKGMIGEAKAKYLISLARDEYNEPIR | |
| | | TRVRKSIGRIVTMKRNSRNLEEIKPYLFRAIEESYYKLDKRIPKAIHVVAVTEDLDIVSR | |
| | | GRTFPHGISKETAYSESVKLLQKILEEDERKIRRIGVRESKFIEAIGLDKE | |
| 133 | Protein | MIVLFVDFDYFYAQVEEVLNPSLKGKPVVVCVFSGRFEDSGAVATANYEARKFGVKA | Dpo4-Δ3 167C, |
| | | GIPIVEAKKCLPNAVYLPMRKEVYQQVSSRIMNLLREYSEKIEIASIDEAYLDISDKVRD | polymerase Dpo4- |
| | | YREAYNLGLEIKNKILEKEKITVTVGISKNKVFAKIAADMAKPNGIKVIDDEEVKRLIRE | Δ3variant I67C |
| | | LDIADVPGIGNITAEKLKKLGINKLVDTLSIEFDKLKGMIGEAKAKYLISLARDEYNEPI | |
| | | RTRVRKSIGRIVTMKRNSRNLEEIKPYLFRAIEESYYKLDKRIPKAIHVVAVTEDLDIVS | |
| | | RGRTEPHGISKETAYSESVKLLQKILEEDERKIRRIGVRFSKFIEAIGLDKE | |
| 134 | Protein | MIVLFVDFDYFYAQVEEVLNPSLKGKPVVVCVFSGRFEDSGAVATANYEARKFGVKA | Dpo4-Δ3 S86G, |
| | | GIPIVEAKKILPNAVYLPMRKEVYQQVSGRIMNLLREYSEKIEIASIDEAYLDISDKVRD | polymerase Dpo4- |
| | | YREAYNLGLEIKNKILEKEKITVTVGISKNKVFAKIAADMAKPNGIKVIDDEEVKRLIRE | Δ3variant S86G |
| | | LDIADVPGIGNITAEKLKKLGINKLVDTLSIEFDKLKGMIGEAKAKYLISLARDEYNEPI | |
| | | RTRVRKSIGRIVTMKRNSRNLEEIKPYLFRAIEESYYKLDKRIPKAIHVVAVTEDLDIVS | |
| | | RGRTFPHGISKETAYSESVKLLQKILEEDERKIRRIGVRFSKFIEAIGLDKF | |
| 135 | Protein | MIVLFVDFDYFYAQVEEVLNPSLKGKPVVVCVFSGRFEDSGAVATANYEARKFGVKA | Dpo4-Δ3 |
| | | GIPIVEAKKILPNCVYLPMRKEVYQQVSSRIMNLLREYSEKIEIASIDEAYLDISDKVRD | A71C/A155C/V203C, |
| | | YREAYNLGLEIKNKILEKEKITVTVGISKNKVFAKIACDMAKPNGIKVIDDEEVKRLIRE | polymerase Dpo4-Δ3 |
| | | LDIADVPGIGNITAEKLKKLGINKLCDTLSIEFDKLKGMIGEAKAKYLISLARDEYNEPI | variant |
| | | RTRVRKSIGRIVTMKRNSRNLEEIKPYLFRAIEESYYKLDKRIPKAIHVVAVTEDLDIVS | A71C/A155C/V203C |
| | | RGRTFPHGISKETAYSESVKLLQKILEEDERKIRRIGVRFSKFIEAIGLDKF | |
| 136 | Protein | MIVLFVDFDYFYAQVEEVLNPSLKGKPVVVCVFSGRFEDSGAVATANYEARKFGVKA | Dpo4- |
| | | GIPIVEAKKILPNAVYLPMRKEVYQQVSCRIMNLLREYSEKIEIASIDEAYLDISDKVRD | A3S86C/A155C/V203C, |
| | | YREAYNLGLEIKNKILEKEKITVTVGISKNKVFAKIACDMAKPNGIKVIDDEEVKRLIRE | polymerase Dpo4-Δ3 |
| | | LDIADVPGIGNITAEKLKKLGINKLCDTLSIEFDKLKGMIGEAKAKYLISLARDEYNEPI | variant |
| | | RTRVRKSIGRIVTMKRNSRNLEEIKPYLFRAIEESYYKLDKRIPKAIHVVAVTEDLDIVS | S86C/A155C/V203C, |
| | | RGRTFPHGISKETAYSESVKLLQKILEEDERKIRRIGVRFSKFIEAIGLDKF | |
| 137 | Protein | MIVLFVDFDYFYAQVEEVLNPSLKGKPVVVSVFSGRFEDSGAVATANYEARKFGVKA | Dpo4-Δ3 |
| | | GIPIVEAKKILPNAVYLPMRKEVYQQVSSRIMNLLREYSEKIEIASIDEAYLDISDKVRD | C31S/A155C/V203C, |
| | | YREAYNLGLEIKNKILEKEKITVTVGISKNKVFAKIACDMAKPNGIKVIDDEEVKRLIRE | polymerase Dpo4-Δ3 |
| | | LDIADVPGIGNITAEKLKKLGINKLCDTLSIEFDKLKGMIGEAKAKYLISLARDEYNEPI | variant |
| | | RTRVRKSIGRIVTMKRNSRNLEEIKPYLFRAIEESYYKLDKRIPKAIHVVAVTEDLDIVS | C31S/A155C/V203C, |
| | | RGRTFPHGISKETAYSESVKLLQKILEEDERKIRRIGVRFSKFIEAIGLDKF | |
| 138 | Protein | MIVLFVDFDYFYAQVEEVLNPSLKGKPVVVCVFSGRFEDSGAVATANYEARKFGVKA | Dpo4-Δ3 |
| | | GIPIVEAKKILPNAVYLPGRKEVYQQVSSRIMNLLREYSEKIEIASIDEAYLDISDKVRDY | M76G/A155C/V203C, |
| | | REAYNLGLEIKNKILEKEKITVTVGISKNKVFAKIACDMAKPNGIKVIDDEEVKRLIREL | polymerase Dpo4-Δ3 |
| | | DIADVPGIGNITAEKLKKLGINKLCDTLSIEFDKLKGMIGEAKAKYLISLARDEYNEPIR | variant |
| | | TRVRKSIGRIVTMKRNSRNLEEIKPYLFRAIEESYYKLDKRIPKAIHVVAVTEDLDIVSR | M76G/A155C/V203C, |
| | | GRTFPHGISKETAYSESVKLLQKILEEDERKIRRIGVRFSKFIEAIGLDKF | |
| 139 | Protein | MIVLFVDFDYFYAQVEEVLNPSLKGKPVVVCVFSGRFEDSGAVATANYEARKFGVKA | Dpo4-Δ3 |
| | | GIPIVEAKKILPNAVYLPARKEVYQQVSSRIMNLLREYSEKIEIASIDEAYLDISDKVRDY | M76A/A155C/V203C, |
| | | REAYNLGLEIKNKILEKEKITVTVGISKNKVFAKIACDMAKPNGIKVIDDEEVKRLIREL | polymerase Dpo4-Δ3 |
| | | DIADVPGIGNITAEKLKKLGINKLCDTLSIEFDKLKGMIGEAKAKYLISLARDEYNEPIR | variant |
| | | TRVRKSIGRIVTMKRNSRNLEEIKPYLFRAIEESYYKLDKRIPKAIHVVAVTEDLDIVSR | M76A/A155C/V203C |
| | | GRTFPHGISKETAYSESVKLLQKILEEDERKIRRIGVRFSKFIEAIGLDKF | |
| 140 | Protein | MIVLFVDFDYFYAQVEEVLNPSLKGKPVVVCVFSGRFEDSGAVATANYEARKFGVKA | Dpo4-Δ3 |
| | | GIPIVEAKKCLPNAVYLPMRKEVYQQVSSRIMNLLREYSEKIEIASIDEAYLDISDKVRD | I67C/A155C/V203C, |
| | | YREAYNLGLEIKNKILEKEKITVTVGISKNKVFAKIACDMAKPNGIKVIDDEEVKRLIRE | polymerase Dpo4-Δ3 |
| | | LDIADVPGIGNITAEKLKKLGINKLCDTLSIEFDKLKGMIGEAKAKYLISLARDEYNEPI | variant |
| | | RTRVRKSIGRIVTMKRNSRNLEEIKPYLFRAIEESYYKLDKRIPKAIHVVAVTEDLDIVS | I67C/A155C/V203C |
| | | RGRTFPHGISKETAYSESVKLLQKILEEDERKIRRIGVRFSKFIEAIGLDKF | |
| 141 | Protein | MIVLFVDFDYFYAQVEEVLNPSLKGKPVVVCVFSGRFEDSGAVATANYEARKFGVKA | Dpo4-Δ3 |
| | | GIPIVEAKKILPNAVYLPMRKEVYQQVSGRIMNLLREYSEKIEIASIDEAYLDISDKVRD | S86G/A155C/V203C, |
| | | YREAYNLGLEIKNKILEKEKITVTVGISKNKVFAKIACDMAKPNGIKVIDDEEVKRLIRE | polymerase Dpo4- |
| | | LDIADVPGIGNITAEKLKKLGINKLCDTLSIEFDKLKGMIGEAKAKYLISLARDEYNEPI | Δ3variant |
| | | RTRVRKSIGRIVTMKRNSRNLEEIKPYLFRAIEESYYKLDKRIPKAIHVVAVTEDLDIVS | S86G/A155C/V203C |
| | | RGRTFPHGISKETAYSESVKLLQKILEEDERKIRRIGVRFSKFIEAIGLDKF | |
| 142 | Protein | MIVLFVDFDYFYAQVEEVLNPSLKGKPVVVCVFSGRFEDSGAVATANYEARKFGVKA | Dpo4-Δ3 |
| | | GIPIVEAKKILPNAVYLPMRKEVYQQVSSRIMNLLREYGEKIEIASIDEAYLDISDKVRD | S96G/A155C/V203C, |
| | | YREAYNLGLEIKNKILEKEKITVTVGISKNKVFAKIACDMAKPNGIKVIDDEEVKRLIRE | polymerase Dpo4-Δ3 |
| | | LDIADVPGIGNITAEKLKKLGINKLCDTLSIEFDKLKGMIGEAKAKYLISLARDEYNEPI | variant |
| | | RTRVRKSIGRIVTMKRNSRNLEEIKPYLFRAIEESYYKLDKRIPKAIHVVAVTEDLDIVS | S96G/A155C/V203C |
| | | RGRTFPHGISKETAYSESVKLLQKILEEDERKIRRIGVRFSKFIEAIGLDKF | |
| 143 | Protein | MIVLFVDFDYFYAQVEEVLNPSLKGKPVVVCVFSGRFEDSGAVATANYEARKFGVKA | Dpo4-Δ3 |
| | | GIPIVEAKKILPNAVYLPMRKEVYQQVSCRIMNLLREYSEKIEIASIDEAYLDISDKVRD | S86C/A155C/, |
| | | YREAYNLGLEIKNKILEKEKITVTVGISKNKVFAKIACDMAKPNGIKVIDDEEVKRLIRE | polymerase Dpo4-Δ3 |
| | | LDIADVPGIGNITAEKLKKLGINKLVDTLSIEFDKLKGMIGEAKAKYLISLARDEYNEPI | variant S86C/A155C, |
| | | RTRVRKSIGRIVTMKRNSRNLEEIKPYLFRAIEESYYKLDKRIPKAIHVVAVTEDLDIVS | |
| | | RGRTFPHGISKETAYSESVKLLQKILEEDERKIRRIGVRFSKFIEAIGLDKF | |
| 144 | Protein | MIVLFVDFDYFYAQVEEVLNPSLKGKPVVVSVFSGRFEDSGAVATANYEARKFGVKA | Dpo4-Δ3 |
| | | GIPIVEAKKILPNAVYLPMRKEVYQQVSSRIMNLLREYSEKIEIASIDEAYLDISDKVRD | C31S/A155C, |
| | | YREAYNLGLEIKNKILEKEKITVTVGISKNKVFAKIACDMAKPNGIKVIDDEEVKRLIRE | polymerase Dpo4-Δ3 |
| | | LDIADVPGIGNITAEKLKKLGINKLVDTLSIEFDKLKGMIGEAKAKYLISLARDEYNEPI | variant C31S/A155C, |
| | | RTRVRKSIGRIVTMKRNSRNLEEIKPYLFRAIEESYYKLDKRIPKAIHVVAVTEDLDIVS | |
| | | RGRTFPHGISKETAYSESVKLLQKILEEDERKIRRIGVRFSKFIEAIGLDKF | |
| 145 | Protein | MIVLFVDFDYFYAQVEEVLNPSLKGKPVVVCVFSGRFEDSGAVATANYEARKFGVKA | Dpo4- |
| | | GIPIVEAKKILPNAVYLPGRKEVYQQVSSRIMNLLREYSEKIEIASIDEAYLDISDKVRDY | Δ3M76G/A155C, |
| | | REAYNLGLEIKNKILEKEKITVTVGISKNKVFAKIACDMAKPNGIKVIDDEEVKRLIREL | polymerase Dpo4-Δ3 |
| | | DIADVPGIGNITAEKLKKLGINKLVDTLSIEFDKLKGMIGEAKAKYLISLARDEYNEPIR | variant |
| | | TRVRKSIGRIVTMKRNSRNLEEIKPYLFRAIEESYYKLDKRIPKAIHVVAVTEDLDIVSR | M76G/A155C, |
| | | GRTFPHGISKETAYSESVKLLQKILEEDERKIRRIGVRFSKFIEAIGLDKF | |
| 146 | Protein | MIVLFVDFDYFYAQVEEVLNPSLKGKPVVVCVFSGRFEDSGAVATANYEARKFGVKA | Dpo4-Δ3 |
| | | GIPIVEAKKILPNAVYLPARKEVYQQVSSRIMNLLREYSEKIEIASIDEAYLDISDKVRDY | M76A/A155C, |
| | | REAYNLGLEIKNKILEKEKITVTVGISKNKVFAKIACDMAKPNGIKVIDDEEVKRLIREL | polymerase Dpo4-Δ3 |
| | | DIADVPGIGNITAEKLKKLGINKLVDTLSIEFDKLKGMIGEAKAKYLISLARDEYNEPIR | variant M76A/A155C |
| | | TRVRKSIGRIVTMKRNSRNLEEIKPYLFRAIEESYYKLDKRIPKAIHVVAVTEDLDIVSR | |
| | | GRTFPHGISKETAYSESVKLLQKILEEDERKIRRIGVRFSKFIEAIGLDKF | |
| 147 | Protein | MIVLFVDFDYFYAQVEEVLNPSLKGKPVVVCVFSGRFEDSGAVATANYEARKFGVKA | Dpo4-Δ3 |
| | | GIPIVEAKKCLPNAVYLPMRKEVYQQVSSRIMNLLREYSEKIEIASIDEAYLDISDKVRD | I67C/A155C, |
| | | YREAYNLGLEIKNKILEKEKITVTVGISKNKVFAKIACDMAKPNGIKVIDDEEVKRLIRE | polymerase Dpo4-Δ3 |
| | | LDIADVPGIGNITAEKLKKLGINKLVDTLSIEFDKLKGMIGEAKAKYLISLARDEYNEPI | variant I67C/A155C |
| | | RTRVRKSIGRIVTMKRNSRNLEEIKPYLFRAIEESYYKLDKRIPKAIHVVAVTEDLDIVS | |
| | | RGRTFPHGISKETAYSESVKLLQKILEEDERKIRRIGVRFSKFIEAIGLDKE | |
| 148 | Protein | MIVLFVDFDYFYAQVEEVLNPSLKGKPVVVCVFSGRFEDSGAVATANYEARKFGVKA | Dpo4-Δ3 |
| | | GIPIVEAKKILPNAVYLPMRKEVYQQVSGRIMNLLREYSEKIEIASIDEAYLDISDKVRD | S86G/A155C, |
| | | YREAYNLGLEIKNKILEKEKITVTVGISKNKVFAKIACDMAKPNGIKVIDDEEVKRLIRE | polymerase Dpo4- |
| | | LDIADVPGIGNITAEKLKKLGINKLVDTLSIEFDKLKGMIGEAKAKYLISLARDEYNEPI | Δ3variant |
| | | RTRVRKSIGRIVTMKRNSRNLEEIKPYLFRAIEESYYKLDKRIPKAIHVVAVTEDLDIVS | S86G/A155C |
| | | RGRTFPHGISKETAYSESVKLLQKILEEDERKIRRIGVRFSKFIEAIGLDKF | |
| 149 | Protein | MIVLFVDFDYFYAQVEEVLNPSLKGKPVVVCVFSGRFEDSGAVATANYEARKFGVKA | Dpo4-Δ3 |
| | | GIPIVEAKKILPNAVYLPMRKEVYQQVSSRIMNLLREYGEKIEIASIDEAYLDISDKVRD | S96G/A155C, |
| | | YREAYNLGLEIKNKILEKEKITVTVGISKNKVFAKIACDMAKPNGIKVIDDEEVKRLIRE | polymerase Dpo4-Δ3 |
| | | LDIADVPGIGNITAEKLKKLGINKLVDTLSIEFDKLKGMIGEAKAKYLISLARDEYNEPI | variant S96G/A155C |
| | | RTRVRKSIGRIVTMKRNSRNLEEIKPYLFRAIEESYYKLDKRIPKAIHVVAVTEDLDIVS | |
| | | RGRTFPHGISKETAYSESVKLLQKILEEDERKIRRIGVRFSKFIEAIGLDKF | |
| 150 | Protein | MIVLFVDFDYFYAQVEEVLNPSLKGKPVVVCVFSGRFEDSGAVATANYEARKFGVKA | Dpo4-Δ3 |
| | | GIPIVEAKKILPNCVYLPMRKEVYQQVSSRIMNLLREYSEKIEIASIDEAYLDISDKVRD | A71C/V203C, |
| | | YREAYNLGLEIKNKILEKEKITVTVGISKNKVFAKIAADMAKPNGIKVIDDEEVKRLIRE | polymerase Dpo4- |
| | | LDIADVPGIGNITAEKLKKLGINKLCDTLSIEFDKLKGMIGEAKAKYLISLARDEYNEPI | Δ3variant |
| | | RTRVRKSIGRIVTMKRNSRNLEEIKPYLFRAIEESYYKLDKRIPKAIHVVAVTEDLDIVS | A71C/V203C |
| | | RGRTFPHGISKETAYSESVKLLQKILEEDERKIRRIGVRFSKFIEAIGLDKF | |
| 151 | Protein | MIVLFVDFDYFYAQVEEVLNPSLKGKPVVVCVFSGRFEDSGAVATANYEARKFGVKA | Dpo4-Δ3 |
| | | GIPIVEAKKILPNAVYLPMRKEVYQQVSCRIMNLLREYSEKIEIASIDEAYLDISDKVRD | S86C/V203C, |
| | | YREAYNLGLEIKNKILEKEKITVTVGISKNKVFAKIAADMAKPNGIKVIDDEEVKRLIRE | polymerase Dpo4-Δ3 |
| | | LDIADVPGIGNITAEKLKKLGINKLCDTLSIEFDKLKGMIGEAKAKYLISLARDEYNEPI | variant S86C/V203C, |
| | | RTRVRKSIGRIVTMKRNSRNLEEIKPYLFRAIEESYYKLDKRIPKAIHVVAVTEDLDIVS | |
| | | RGRTFPHGISKETAYSESVKLLQKILEEDERKIRRIGVRFSKFIEAIGLDKF | |
| 152 | Protein | MIVLFVDFDYFYAQVEEVLNPSLKGKPVVVSVFSGRFEDSGAVATANYEARKFGVKA | Dpo4-Δ3 |
| | | GIPIVEAKKILPNAVYLPMRKEVYQQVSSRIMNLLREYSEKIEIASIDEAYLDISDKVRD | C31S/V203C, |
| | | YREAYNLGLEIKNKILEKEKITVTVGISKNKVFAKIAADMAKPNGIKVIDDEEVKRLIRE | polymerase Dpo4- |
| | | LDIADVPGIGNITAEKLKKLGINKLCDTLSIEFDKLKGMIGEAKAKYLISLARDEYNEPI | Δ3variant |
| | | RTRVRKSIGRIVTMKRNSRNLEEIKPYLFRAIEESYYKLDKRIPKAIHVVAVTEDLDIVS | C31S/V203C, |
| | | RGRTFPHGISKETAYSESVKLLQKILEEDERKIRRIGVRFSKFIEAIGLDKF | |
| 153 | Protein | MIVLFVDFDYFYAQVEEVLNPSLKGKPVVVCVFSGRFEDSGAVATANYEARKFGVKA | Dpo4-Δ3 |
| | | GIPIVEAKKILPNAVYLPGRKEVYQQVSSRIMNLLREYSEKIEIASIDEAYLDISDKVRDY | M76G/V203C, |
| | | REAYNLGLEIKNKILEKEKITVTVGISKNKVFAKIAADMAKPNGIKVIDDEEVKRLIREL | polymerase Dpo4- |
| | | DIADVPGIGNITAEKLKKLGINKLCDTLSIEFDKLKGMIGEAKAKYLISLARDEYNEPIR | Δ3variant |
| | | TRVRKSIGRIVTMKRNSRNLEEIKPYLFRAIEESYYKLDKRIPKAIHVVAVTEDLDIVSR | M76G/V203C, |
| | | GRTFPHGISKETAYSESVKLLQKILEEDERKIRRIGVRFSKFIEAIGLDKF | |
| 154 | Protein | MIVLFVDFDYFYAQVEEVLNPSLKGKPVVVCVFSGRFEDSGAVATANYEARKFGVKA | Dpo4-Δ3 |
| | | GIPIVEAKKILPNAVYLPARKEVYQQVSSRIMNLLREYSEKIEIASIDEAYLDISDKVRDY | M76A/V203C, |
| | | REAYNLGLEIKNKILEKEKITVTVGISKNKVFAKIAADMAKPNGIKVIDDEEVKRLIREL | polymerase Dpo4- |
| | | DIADVPGIGNITAEKLKKLGINKLCDTLSIEFDKLKGMIGEAKAKYLISLARDEYNEPIR | Δ3variant |
| | | TRVRKSIGRIVTMKRNSRNLEEIKPYLFRAIEESYYKLDKRIPKAIHVVAVTEDLDIVSR | M76A/V203C |
| | | GRTFPHGISKETAYSESVKLLQKILEEDERKIRRIGVRFSKFIEAIGLDKF | |
| 155 | Protein | MIVLFVDFDYFYAQVEEVLNPSLKGKPVVVCVFSGRFEDSGAVATANYEARKFGVKA | Dpo4-Δ3 |
| | | GIPIVEAKKCLPNAVYLPMRKEVYQQVSSRIMNLLREYSEKIEIASIDEAYLDISDKVRD | I67C/V203C, |
| | | YREAYNLGLEIKNKILEKEKITVTVGISKNKVFAKIAADMAKPNGIKVIDDEEVKRLIRE | polymerase Dpo4-Δ3 |
| | | LDIADVPGIGNITAEKLKKLGINKLCDTLSIEFDKLKGMIGEAKAKYLISLARDEYNEPI | variant I67C/V203C |
| | | RTRVRKSIGRIVTMKRNSRNLEEIKPYLFRAIEESYYKLDKRIPKAIHVVAVTEDLDIVS | |
| | | RGRTFPHGISKETAYSESVKLLQKILEEDERKIRRIGVRFSKFIEAIGLDKF | |
| 156 | Protein | MIVLFVDFDYFYAQVEEVLNPSLKGKPVVVCVFSGRFEDSGAVATANYEARKFGVKA | Dpo4-Δ3 |
| | | GIPIVEAKKILPNAVYLPMRKEVYQQVSGRIMNLLREYSEKIEIASIDEAYLDISDKVRD | S86G/V203C, |
| | | YREAYNLGLEIKNKILEKEKITVTVGISKNKVFAKIAADMAKPNGIKVIDDEEVKRLIRE | polymerase Dpo4-Δ3 |
| | | LDIADVPGIGNITAEKLKKLGINKLCDTLSIEFDKLKGMIGEAKAKYLISLARDEYNEPI | variant S86G/V203C |
| | | RTRVRKSIGRIVTMKRNSRNLEEIKPYLFRAIEESYYKLDKRIPKAIHVVAVTEDLDIVS | |
| | | RGRTFPHGISKETAYSESVKLLQKILEEDERKIRRIGVRFSKFIEAIGLDKF | |
| 157 | Protein | MIVLFVDFDYFYAQVEEVLNPSLKGKPVVVCVFSGRFEDSGAVATANYEARKFGVKA | Dpo4-Δ3 |
| | | GIPIVEAKKILPNAVYLPMRKEVYQQVSSRIMNLLREYGEKIEIASIDEAYLDISDKVRD | S96G/V203C, |
| | | YREAYNLGLEIKNKILEKEKITVTVGISKNKVFAKIAADMAKPNGIKVIDDEEVKRLIRE | polymerase Dpo4-Δ3 |
| | | LDIADVPGIGNITAEKLKKLGINKLCDTLSIEFDKLKGMIGEAKAKYLISLARDEYNEPI | variant S96G/V203C |
| | | RTRVRKSIGRIVTMKRNSRNLEEIKPYLFRAIEESYYKLDKRIPKAIHVVAVTEDLDIVS | |
| | | RGRTFPHGISKETAYSESVKLLQKILEEDERKIRRIGVRFSKFIEAIGLDKF | |
| 158 | Protein | MIVLFVDFDYFYAQVEEVLNPSLKGKPVVVSVFSGRFEDSGAVATANYEARKFGVKA | Dpo4-Δ3 |
| | | GIPIVEAKKILPNAVYLPMRKEVYQQVSSRIMNLLREYSEKIEIASIDEAYLDISDKVRD | C31S/A155C, |
| | | YREAYNLGLEIKNKILEKEKITVTVGISKNKVFAKIACDMAKPNGIKVIDDEEVKRLIRE | polymerase Dpo4-Δ3 |
| | | LDIADVPGIGNITAEKLKKLGINKLVDTLSIEFDKLKGMIGEAKAKYLISLARDEYNEPI | variant C31S/A155C, |
| | | RTRVRKSIGRIVTMKRNSRNLEEIKPYLFRAIEESYYKLDKRIPKAIHVVAVTEDLDIVS | |
| | | RGRTFPHGISKETAYSESVKLLQKILEEDERKIRRIGVRFSKFIEAIGLDKF | |
| 159 | Protein | MIVLFVDFDYFYAQVEEVLNPSLKGKPVVVSVFSGRFEDSGAVATANYEARKFGVKA | Dpo4-Δ3 |
| | | GIPIVEAKKILPNAVYLPMRKEVYQQVSSRIMNLLREYSEKIEIASIDEAYLDISDKVRD | C31S/V203C, |
| | | YREAYNLGLEIKNKILEKEKITVTVGISKNKVFAKIAADMAKPNGIKVIDDEEVKRLIRE | polymerase Dpo4-Δ3 |
| | | LDIADVPGIGNITAEKLKKLGINKLCDTLSIEFDKLKGMIGEAKAKYLISLARDEYNEPI | variant C31S/V203C, |
| | | RTRVRKSIGRIVTMKRNSRNLEEIKPYLFRAIEESYYKLDKRIPKAIHVVAVTEDLDIVS | |
| | | RGRTFPHGISKETAYSESVKLLQKILEEDERKIRRIGVRFSKFIEAIGLDKF | |
| 160 | Protein | MIVLFVDFDYFYAQVEEVLNPSLKGKPVVVSVFSGRFEDSGAVATANYEARKFGVKA | Dpo4-Δ3 |
| | | GIPIVEAKKILPNAVYLPMRKEVYQQVSSRIMNLLREYSEKIEIASIDEAYLDISDKVRD | C31S/A155C/V203C, |
| | | YREAYNLGLEIKNKILEKEKITVTVGISKNKVFAKIACDMAKPNGIKVIDDEEVKRLIRE | polymerase Dpo4-Δ3 |
| | | LDIADVPGIGNITAEKLKKLGINKLCDTLSIEFDKLKGMIGEAKAKYLISLARDEYNEPI | variant |
| | | RTRVRKSIGRIVTMKRNSRNLEEIKPYLFRAIEESYYKLDKRIPKAIHVVAVTEDLDIVS | C31S/A155C/V203C, |
| | | RGRTFPHGISKETAYSESVKLLQKILEEDERKIRRIGVRFSKFIEAIGLDKF | |
| 161 | Protein | MIVLFVDFDYFYAQVEEVLNPSLKGKPVVVCVFSGRFEDSGAVATANYEARKFGVKA | Dpo4-Δ6, |
| | | GIPIVEAKKILPNAVYLPMRKEVYQQVSSRIMNLLREYSEKIEIASIDEAYLDISDKVRD | |
| | | YREAYNLGLEIKNKILEKEKITVTVGISKNKVFAKIAADMAKPNGIKVIDDEEVKRLIRE | |
| | | LDIADVPGIGNITAEKLKKLGINKLVDTLSIEFDKLKGMIGEAKAKYLISLARDEYNEPI | |
| | | RTRVRKSIGRIVTMKRNSRNLEEIKPYLFRAIEESYYKLDKRIPKAIHVVAVTEDLDIVS | |
| | | RGRTFPHGISKETAYSESVKLLQKILEEDERKIRRIGVRFSKFIEAIGL | |
| 162 | Protein | MIVLFVDFDYFYAQVEEVLNPSLKGKPVVVCVFSGRFEDSGAVATANYEARKFGVKA | Dpo4-Δ6 A155C, |
| | | GIPIVEAKKILPNAVYLPMRKEVYQQVSSRIMNLLREYSEKIEIASIDEAYLDISDKVRD | |
| | | YREAYNLGLEIKNKILEKEKITVTVGISKNKVFAKIACDMAKPNGIKVIDDEEVKRLIRE | |
| | | LDIADVPGIGNITAEKLKKLGINKLVDTLSIEFDKLKGMIGEAKAKYLISLARDEYNEPI | |
| | | RTRVRKSIGRIVTMKRNSRNLEEIKPYLFRAIEESYYKLDKRIPKAIHVVAVTEDLDIVS | |
| | | RGRTFPHGISKETAYSESVKLLQKILEEDERKIRRIGVRFSKFIEAIGL | |
| 163 | Protein | MIVLFVDFDYFYAQVEEVLNPSLKGKPVVVCVFSGRFEDSGAVATANYEARKFGVKA | Dpo4-Δ6 V203C, |
| | | GIPIVEAKKILPNAVYLPMRKEVYQQVSSRIMNLLREYSEKIEIASIDEAYLDISDKVRD | |
| | | YREAYNLGLEIKNKILEKEKITVTVGISKNKVFAKIAADMAKPNGIKVIDDEEVKRLIRE | |
| | | LDIADVPGIGNITAEKLKKLGINKLCDTLSIEFDKLKGMIGEAKAKYLISLARDEYNEPI | |
| | | RTRVRKSIGRIVTMKRNSRNLEEIKPYLFRAIEESYYKLDKRIPKAIHVVAVTEDLDIVS | |
| | | RGRTFPHGISKETAYSESVKLLQKILEEDERKIRRIGVRFSKFIEAIGL | |
| 164 | Protein | MIVLFVDFDYFYAQVEEVLNPSLKGKPVVVCVFSGRFEDSGAVATANYEARKFGVKA | Dpo4-Δ6 |
| | | GIPIVEAKKILPNAVYLPMRKEVYQQVSSRIMNLLREYSEKIEIASIDEAYLDISDKVRD | A155C/203C, |
| | | YREAYNLGLEIKNKILEKEKITVTVGISKNKVFAKIACDMAKPNGIKVIDDEEVKRLIRE | |
| | | LDIADVPGIGNITAEKLKKLGINKLCDTLSIEFDKLKGMIGEAKAKYLISLARDEYNEPI | |
| | | RTRVRKSIGRIVTMKRNSRNLEEIKPYLFRAIEESYYKLDKRIPKAIHVVAVTEDLDIVS | |
| | | RGRTFPHGISKETAYSESVKLLQKILEEDERKIRRIGVRFSKFIEAIGL | |
| 165 | Protein | MIVLFVDFDYFYAQVEEVLNPSLKGKPVVVSVFSGRFEDSGAVATANYEARKFGVKA | Dpo4-Δ6 C31S, |
| | | GIPIVEAKKILPNAVYLPMRKEVYQQVSSRIMNLLREYSEKIEIASIDEAYLDISDKVRD | |
| | | YREAYNLGLEIKNKILEKEKITVTVGISKNKVFAKIAADMAKPNGIKVIDDEEVKRLIRE | |
| | | LDIADVPGIGNITAEKLKKLGINKLVDTLSIEFDKLKGMIGEAKAKYLISLARDEYNEPI | |
| | | RTRVRKSIGRIVTMKRNSRNLEEIKPYLFRAIEESYYKLDKRIPKAIHVVAVTEDLDIVS | |
| | | RGRTFPHGISKETAYSESVKLLQKILEEDERKIRRIGVRFSKFIEAIGL | |
| 166 | Protein | MIVLFVDFDYFYAQVEEVLNPSLKGKPVVVCVFSGRFEDSGAVATANYEARKFGVKA | Dpo4-Δ6 S85C, |
| | | GIPIVEAKKILPNAVYLPMRKEVYQQVCSRIMNLLREYSEKIEIASIDEAYLDISDKVRD | |
| | | YREAYNLGLEIKNKILEKEKITVTVGISKNKVFAKIAADMAKPNGIKVIDDEEVKRLIRE | |
| | | LDIADVPGIGNITAEKLKKLGINKLVDTLSIEFDKLKGMIGEAKAKYLISLARDEYNEPI | |
| | | RTRVRKSIGRIVTMKRNSRNLEEIKPYLFRAIEESYYKLDKRIPKAIHVVAVTEDLDIVS | |
| | | RGRTFPHGISKETAYSESVKLLQKILEEDERKIRRIGVRFSKFIEAIGL | |
| 167 | Protein | MIVLFVDFDYFYAQVEEVLNPSLKGKPVVVCVFSGRFEDSGAVATANYEARKFGVKA | Dpo4-Δ6 S86C, |
| | | GIPIVEAKKILPNAVYLPMRKEVYQQVSCRIMNLLREYSEKIEIASIDEAYLDISDKVRD | |
| | | YREAYNLGLEIKNKILEKEKITVTVGISKNKVFAKIAADMAKPNGIKVIDDEEVKRLIRE | |
| | | LDIADVPGIGNITAEKLKKLGINKLVDTLSIEFDKLKGMIGEAKAKYLISLARDEYNEPI | |
| | | RTRVRKSIGRIVTMKRNSRNLEEIKPYLFRAIEESYYKLDKRIPKAIHVVAVTEDLDIVS | |
| | | RGRTFPHGISKETAYSESVKLLQKILEEDERKIRRIGVRFSKFIEAIGL | |
| 168 | Protein | MIVLFVDFDYFYAQVEEVLNPSLKGKPVVVCVFSGRFEDSGAVATANYEARKFGVKA | Dpo4-Δ6 S96C, |
| | | GIPIVEAKKILPNAVYLPMRKEVYQQVSSRIMNLLREYCEKIEIASIDEAYLDISDKVRD | |
| | | YREAYNLGLEIKNKILEKEKITVTVGISKNKVFAKIAADMAKPNGIKVIDDEEVKRLIRE | |
| | | LDIADVPGIGNITAEKLKKLGINKLVDTLSIEFDKLKGMIGEAKAKYLISLARDEYNEPI | |
| | | RTRVRKSIGRIVTMKRNSRNLEEIKPYLFRAIEESYYKLDKRIPKAIHVVAVTEDLDIVS | |
| | | RGRTFPHGISKETAYSESVKLLQKILEEDERKIRRIGVRFSKFIEAIGL | |
| 169 | Protein | MIVLFVDFDYFYAQVEEVLNPSLKGKPVVVCVFSGRFEDSGAVATANYEARKFGVKA | Dpo4-Δ6 A71C, |
| | | GIPIVEAKKILPNCVYLPMRKEVYQQVSSRIMNLLREYSEKIEIASIDEAYLDISDKVRD | |
| | | YREAYNLGLEIKNKILEKEKITVTVGISKNKVFAKIAADMAKPNGIKVIDDEEVKRLIRE | |
| | | LDIADVPGIGNITAEKLKKLGINKLVDTLSIEFDKLKGMIGEAKAKYLISLARDEYNEPI | |
| | | RTRVRKSIGRIVTMKRNSRNLEEIKPYLFRAIEESYYKLDKRIPKAIHVVAVTEDLDIVS | |
| | | RGRTFPHGISKETAYSESVKLLQKILEEDERKIRRIGVRFSKFIEAIGL | |
| 170 | Protein | MIVLFVDFDYFYAQVEEVLNPSLKGKPVVVCVFSGRFEDSGAVATANYEARKFGVKA | Dpo4-Δ6 M76G, |
| | | GIPIVEAKKILPNAVYLPGRKEVYQQVSSRIMNLLREYSEKIEIASIDEAYLDISDKVRDY | |
| | | REAYNLGLEIKNKILEKEKITVTVGISKNKVFAKIAADMAKPNGIKVIDDEEVKRLIREL | |
| | | DIADVPGIGNITAEKLKKLGINKLVDTLSIEFDKLKGMIGEAKAKYLISLARDEYNEPIR | |
| | | TRVRKSIGRIVTMKRNSRNLEEIKPYLFRAIEESYYKLDKRIPKAIHVVAVTEDLDIVSR | |
| | | GRTFPHGISKETAYSESVKLLQKILEEDERKIRRIGVRFSKFIEAIGL | |
| 171 | Protein | MIVLFVDFDYFYAQVEEVLNPSLKGKPVVVCVFSGRFEDSGAVATANYEARKFGVKA | Dpo4-Δ6 M76A, |
| | | GIPIVEAKKILPNAVYLPARKEVYQQVSSRIMNLLREYSEKIEIASIDEAYLDISDKVRDY | |
| | | REAYNLGLEIKNKILEKEKITVTVGISKNKVFAKIAADMAKPNGIKVIDDEEVKRLIREL | |
| | | DIADVPGIGNITAEKLKKLGINKLVDTLSIEFDKLKGMIGEAKAKYLISLARDEYNEPIR | |
| | | TRVRKSIGRIVTMKRNSRNLEEIKPYLFRAIEESYYKLDKRIPKAIHVVAVTEDLDIVSR | |
| | | GRTFPHGISKETAYSESVKLLQKILEEDERKIRRIGVRFSKFIEAIGL | |
| 172 | Protein | MIVLFVDFDYFYAQVEEVLNPSLKGKPVVVCVFSGRFEDSGAVATANYEARKFGVKA | Dpo4-Δ6 I67C, |
| | | GIPIVEAKKCLPNAVYLPMRKEVYQQVSSRIMNLLREYSEKIEIASIDEAYLDISDKVRD | |
| | | YREAYNLGLEIKNKILEKEKITVTVGISKNKVFAKIAADMAKPNGIKVIDDEEVKRLIRE | |
| | | LDIADVPGIGNITAEKLKKLGINKLVDTLSIEFDKLKGMIGEAKAKYLISLARDEYNEPI | |
| | | RTRVRKSIGRIVTMKRNSRNLEEIKPYLFRAIEESYYKLDKRIPKAIHVVAVTEDLDIVS | |
| | | RGRTFPHGISKETAYSESVKLLQKILEEDERKIRRIGVRFSKFIEAIGL | |
| 173 | Protein | MIVLFVDFDYFYAQVEEVLNPSLKGKPVVVCVFSGRFEDSGAVATANYEARKFGVKA | Dpo4-Δ6 S86G, |
| | | GIPIVEAKKILPNAVYLPMRKEVYQQVSGRIMNLLREYSEKIEIASIDEAYLDISDKVRD | |
| | | YREAYNLGLEIKNKILEKEKITVTVGISKNKVFAKIAADMAKPNGIKVIDDEEVKRLIRE | |
| | | LDIADVPGIGNITAEKLKKLGINKLVDTLSIEFDKLKGMIGEAKAKYLISLARDEYNEPI | |
| | | RTRVRKSIGRIVTMKRNSRNLEEIKPYLFRAIEESYYKLDKRIPKAIHVVAVTEDLDIVS | |
| | | RGRTFPHGISKETAYSESVKLLQKILEEDERKIRRIGVRFSKFIEAIGL | |
| 174 | Protein | MIVLFVDFDYFYAQVEEVLNPSLKGKPVVVCVFSGRFEDSGAVATANYEARKFGVKA | Dpo4-Δ6 |
| | | GIPIVEAKKILPNCVYLPMRKEVYQQVSSRIMNLLREYSEKIEIASIDEAYLDISDKVRD | A71C/A155C/V203C, |
| | | YREAYNLGLEIKNKILEKEKITVTVGISKNKVFAKIACDMAKPNGIKVIDDEEVKRLIRE | |
| | | LDIADVPGIGNITAEKLKKLGINKLCDTLSIEFDKLKGMIGEAKAKYLISLARDEYNEPI | |
| | | RTRVRKSIGRIVTMKRNSRNLEEIKPYLFRAIEESYYKLDKRIPKAIHVVAVTEDLDIVS | |
| | | RGRTFPHGISKETAYSESVKLLQKILEEDERKIRRIGVRFSKFIEAIGL | |
| 175 | Protein | MIVLFVDFDYFYAQVEEVLNPSLKGKPVVVCVFSGRFEDSGAVATANYEARKFGVKA | Dpo4-Δ6 |
| | | GIPIVEAKKILPNAVYLPMRKEVYQQVSCRIMNLLREYSEKIEIASIDEAYLDISDKVRD | S86C/A155C/V203C, |
| | | YREAYNLGLEIKNKILEKEKITVTVGISKNKVFAKIACDMAKPNGIKVIDDEEVKRLIRE | |
| | | LDIADVPGIGNITAEKLKKLGINKLCDTLSIEFDKLKGMIGEAKAKYLISLARDEYNEPI | |
| | | RTRVRKSIGRIVTMKRNSRNLEEIKPYLFRAIEESYYKLDKRIPKAIHVVAVTEDLDIVS | |
| | | RGRTFPHGISKETAYSESVKLLQKILEEDERKIRRIGVRFSKFIEAIGL | |
| 176 | Protein | MIVLFVDFDYFYAQVEEVLNPSLKGKPVVVSVFSGRFEDSGAVATANYEARKFGVKA | Dpo4-Δ6 |
| | | GIPIVEAKKILPNAVYLPMRKEVYQQVSSRIMNLLREYSEKIEIASIDEAYLDISDKVRD | C31S/A155C/V203C, |
| | | YREAYNLGLEIKNKILEKEKITVTVGISKNKVFAKIACDMAKPNGIKVIDDEEVKRLIRE | |
| | | LDIADVPGIGNITAEKLKKLGINKLCDTLSIEFDKLKGMIGEAKAKYLISLARDEYNEPI | |
| | | RTRVRKSIGRIVTMKRNSRNLEEIKPYLFRAIEESYYKLDKRIPKAIHVVAVTEDLDIVS | |
| | | RGRTFPHGISKETAYSESVKLLQKILEEDERKIRRIGVRFSKFIEAIGL | |
| 177 | Protein | MIVLFVDFDYFYAQVEEVLNPSLKGKPVVVCVFSGRFEDSGAVATANYEARKFGVKA | Dpo4-Δ6 |
| | | GIPIVEAKKILPNAVYLPGRKEVYQQVSSRIMNLLREYSEKIEIASIDEAYLDISDKVRDY | M76G/A155C/V203C, |
| | | REAYNLGLEIKNKILEKEKITVTVGISKNKVFAKIACDMAKPNGIKVIDDEEVKRLIREL | |
| | | DIADVPGIGNITAEKLKKLGINKLCDTLSIEFDKLKGMIGEAKAKYLISLARDEYNEPIR | |
| | | TRVRKSIGRIVTMKRNSRNLEEIKPYLFRAIEESYYKLDKRIPKAIHVVAVTEDLDIVSR | |
| | | GRTFPHGISKETAYSESVKLLQKILEEDERKIRRIGVRFSKFIEAIGL | |
| 178 | Protein | MIVLFVDFDYFYAQVEEVLNPSLKGKPVVVCVFSGRFEDSGAVATANYEARKFGVKA | Dpo4-Δ6 |
| | | GIPIVEAKKILPNAVYLPARKEVYQQVSSRIMNLLREYSEKIEIASIDEAYLDISDKVRDY | M76A/A155C/V203C, |
| | | REAYNLGLEIKNKILEKEKITVTVGISKNKVFAKIACDMAKPNGIKVIDDEEVKRLIREL | |
| | | DIADVPGIGNITAEKLKKLGINKLCDTLSIEFDKLKGMIGEAKAKYLISLARDEYNEPIR | |
| | | TRVRKSIGRIVTMKRNSRNLEEIKPYLFRAIEESYYKLDKRIPKAIHVVAVTEDLDIVSR | |
| | | GRTFPHGISKETAYSESVKLLQKILEEDERKIRRIGVRFSKFIEAIGL | |
| 179 | Protein | MIVLFVDFDYFYAQVEEVLNPSLKGKPVVVCVFSGRFEDSGAVATANYEARKFGVKA | Dpo4-Δ6 |
| | | GIPIVEAKKCLPNAVYLPMRKEVYQQVSSRIMNLLREYSEKIEIASIDEAYLDISDKVRD | 167C/A155C/V203C, |
| | | YREAYNLGLEIKNKILEKEKITVTVGISKNKVFAKIACDMAKPNGIKVIDDEEVKRLIRE | |
| | | LDIADVPGIGNITAEKLKKLGINKLCDTLSIEFDKLKGMIGEAKAKYLISLARDEYNEPI | |
| | | RTRVRKSIGRIVTMKRNSRNLEEIKPYLFRAIEESYYKLDKRIPKAIHVVAVTEDLDIVS | |
| | | RGRTFPHGISKETAYSESVKLLQKILEEDERKIRRIGVRFSKFIEAIGL | |
| 180 | Protein | MIVLFVDFDYFYAQVEEVLNPSLKGKPVVVCVFSGRFEDSGAVATANYEARKFGVKA | Dpo4-Δ6 |
| | | GIPIVEAKKILPNAVYLPMRKEVYQQVSGRIMNLLREYSEKIEIASIDEAYLDISDKVRD | S86G/A155C/V203C, |
| | | YREAYNLGLEIKNKILEKEKITVTVGISKNKVFAKIACDMAKPNGIKVIDDEEVKRLIRE | |
| | | LDIADVPGIGNITAEKLKKLGINKLCDTLSIEFDKLKGMIGEAKAKYLISLARDEYNEPI | |
| | | RTRVRKSIGRIVTMKRNSRNLEEIKPYLFRAIEESYYKLDKRIPKAIHVVAVTEDLDIVS | |
| | | RGRTFPHGISKETAYSESVKLLQKILEEDERKIRRIGVRFSKFIEAIGL | |
| 181 | Protein | MIVLFVDFDYFYAQVEEVLNPSLKGKPVVVCVFSGRFEDSGAVATANYEARKFGVKA | Dpo4-Δ6 |
| | | GIPIVEAKKILPNAVYLPMRKEVYQQVSSRIMNLLREYGEKIEIASIDEAYLDISDKVRD | S96G/A155C/V203C, |
| | | YREAYNLGLEIKNKILEKEKITVTVGISKNKVFAKIACDMAKPNGIKVIDDEEVKRLIRE | |
| | | LDIADVPGIGNITAEKLKKLGINKLCDTLSIEFDKLKGMIGEAKAKYLISLARDEYNEPI | |
| | | RTRVRKSIGRIVTMKRNSRNLEEIKPYLFRAIEESYYKLDKRIPKAIHVVAVTEDLDIVS | |
| | | RGRTFPHGISKETAYSESVKLLQKILEEDERKIRRIGVRFSKFIEAIGL | |
| 182 | Protein | MIVLFVDFDYFYAQVEEVLNPSLKGKPVVVCVFSGRFEDSGAVATANYEARKFGVKA | Dpo4-Δ6 |
| | | GIPIVEAKKILPNCVYLPMRKEVYQQVSSRIMNLLREYSEKIEIASIDEAYLDISDKVRD | A71C/A155C, |
| | | YREAYNLGLEIKNKILEKEKITVTVGISKNKVFAKIACDMAKPNGIKVIDDEEVKRLIRE | |
| | | LDIADVPGIGNITAEKLKKLGINKLVDTLSIEFDKLKGMIGEAKAKYLISLARDEYNEPI | |
| | | RTRVRKSIGRIVTMKRNSRNLEEIKPYLFRAIEESYYKLDKRIPKAIHVVAVTEDLDIVS | |
| | | RGRTFPHGISKETAYSESVKLLQKILEEDERKIRRIGVRFSKFIEAIGL | |
| 183 | Protein | MIVLFVDFDYFYAQVEEVLNPSLKGKPVVVCVFSGRFEDSGAVATANYEARKFGVKA | Dpo4-Δ6 |
| | | GIPIVEAKKILPNAVYLPMRKEVYQQVSCRIMNLLREYSEKIEIASIDEAYLDISDKVRD | S86C/A155C/,, |
| | | YREAYNLGLEIKNKILEKEKITVTVGISKNKVFAKIACDMAKPNGIKVIDDEEVKRLIRE | |
| | | LDIADVPGIGNITAEKLKKLGINKLVDTLSIEFDKLKGMIGEAKAKYLISLARDEYNEPI | |
| | | RTRVRKSIGRIVTMKRNSRNLEEIKPYLFRAIEESYYKLDKRIPKAIHVVAVTEDLDIVS | |
| | | RGRTFPHGISKETAYSESVKLLQKILEEDERKIRRIGVRFSKFIEAIGL | |
| 184 | Protein | MIVLFVDFDYFYAQVEEVLNPSLKGKPVVVSVFSGRFEDSGAVATANYEARKFGVKA | Dpo4-Δ6 |
| | | GIPIVEAKKILPNAVYLPMRKEVYQQVSSRIMNLLREYSEKIEIASIDEAYLDISDKVRD | C31S/A155C, |
| | | YREAYNLGLEIKNKILEKEKITVTVGISKNKVFAKIACDMAKPNGIKVIDDEEVKRLIRE | |
| | | LDIADVPGIGNITAEKLKKLGINKLVDTLSIEFDKLKGMIGEAKAKYLISLARDEYNEPI | |
| | | RTRVRKSIGRIVTMKRNSRNLEEIKPYLFRAIEESYYKLDKRIPKAIHVVAVTEDLDIVS | |
| | | RGRTFPHGISKETAYSESVKLLQKILEEDERKIRRIGVRFSKFIEAIGL | |
| 185 | Protein | MIVLFVDFDYFYAQVEEVLNPSLKGKPVVVCVFSGRFEDSGAVATANYEARKFGVKA | Dpo4-Δ6 |
| | | GIPIVEAKKILPNAVYLPGRKEVYQQVSSRIMNLLREYSEKIEIASIDEAYLDISDKVRDY | M76G/A155C, |
| | | REAYNLGLEIKNKILEKEKITVTVGISKNKVFAKIACDMAKPNGIKVIDDEEVKRLIREL | |
| | | DIADVPGIGNITAEKLKKLGINKLVDTLSIEFDKLKGMIGEAKAKYLISLARDEYNEPIR | |
| | | TRVRKSIGRIVTMKRNSRNLEEIKPYLFRAIEESYYKLDKRIPKAIHVVAVTEDLDIVSR | |
| | | GRTFPHGISKETAYSESVKLLQKILEEDERKIRRIGVRFSKFIEAIGL | |
| 186 | Protein | MIVLFVDFDYFYAQVEEVLNPSLKGKPVVVCVFSGRFEDSGAVATANYEARKFGVKA | Dpo4-Δ6 |
| | | GIPIVEAKKILPNAVYLPARKEVYQQVSSRIMNLLREYSEKIEIASIDEAYLDISDKVRDY | M76A/A155C, |
| | | REAYNLGLEIKNKILEKEKITVTVGISKNKVFAKIACDMAKPNGIKVIDDEEVKRLIREL | |
| | | DIADVPGIGNITAEKLKKLGINKLVDTLSIEFDKLKGMIGEAKAKYLISLARDEYNEPIR | |
| | | TRVRKSIGRIVTMKRNSRNLEEIKPYLFRAIEESYYKLDKRIPKAIHVVAVTEDLDIVSR | |
| | | GRTFPHGISKETAYSESVKLLQKILEEDERKIRRIGVRFSKFIEAIGL | |
| 187 | Protein | MIVLFVDFDYFYAQVEEVLNPSLKGKPVVVCVFSGRFEDSGAVATANYEARKFGVKA | Dpo4-Δ6 |
| | | GIPIVEAKKCLPNAVYLPMRKEVYQQVSSRIMNLLREYSEKIEIASIDEAYLDISDKVRD | I67C/A155C, |
| | | YREAYNLGLEIKNKILEKEKITVTVGISKNKVFAKIACDMAKPNGIKVIDDEEVKRLIRE | |
| | | LDIADVPGIGNITAEKLKKLGINKLVDTLSIEFDKLKGMIGEAKAKYLISLARDEYNEPI | |
| | | RTRVRKSIGRIVTMKRNSRNLEEIKPYLFRAIEESYYKLDKRIPKAIHVVAVTEDLDIVS | |
| | | RGRTFPHGISKETAYSESVKLLQKILEEDERKIRRIGVRFSKFIEAIGL | |
| 188 | Protein | MIVLFVDFDYFYAQVEEVLNPSLKGKPVVVCVFSGRFEDSGAVATANYEARKFGVKA | Dpo4-Δ6 |
| | | GIPIVEAKKILPNAVYLPMRKEVYQQVSGRIMNLLREYSEKIEIASIDEAYLDISDKVRD | S86G/A155C, |
| | | YREAYNLGLEIKNKILEKEKITVTVGISKNKVFAKIACDMAKPNGIKVIDDEEVKRLIRE | |
| | | LDIADVPGIGNITAEKLKKLGINKLVDTLSIEFDKLKGMIGEAKAKYLISLARDEYNEPI | |
| | | RTRVRKSIGRIVTMKRNSRNLEEIKPYLFRAIEESYYKLDKRIPKAIHVVAVTEDLDIVS | |
| | | RGRTFPHGISKETAYSESVKLLQKILEEDERKIRRIGVRFSKFIEAIGL | |
| 189 | Protein | MIVLFVDFDYFYAQVEEVLNPSLKGKPVVVCVFSGRFEDSGAVATANYEARKFGVKA | Dpo4-Δ6 |
| | | GIPIVEAKKILPNAVYLPMRKEVYQQVSSRIMNLLREYGEKIEIASIDEAYLDISDKVRD | S96G/A155C, |
| | | YREAYNLGLEIKNKILEKEKITVTVGISKNKVFAKIACDMAKPNGIKVIDDEEVKRLIRE | |
| | | LDIADVPGIGNITAEKLKKLGINKLVDTLSIEFDKLKGMIGEAKAKYLISLARDEYNEPI | |
| | | RTRVRKSIGRIVTMKRNSRNLEEIKPYLFRAIEESYYKLDKRIPKAIHVVAVTEDLDIVS | |
| | | RGRTFPHGISKETAYSESVKLLQKILEEDERKIRRIGVRFSKFIEAIGL | |
| 190 | Protein | MIVLFVDFDYFYAQVEEVLNPSLKGKPVVVCVFSGRFEDSGAVATANYEARKFGVKA | Dpo4-Δ6 |
| | | GIPIVEAKKILPNCVYLPMRKEVYQQVSSRIMNLLREYSEKIEIASIDEAYLDISDKVRD | A71C/V203C, |
| | | YREAYNLGLEIKNKILEKEKITVTVGISKNKVFAKIAADMAKPNGIKVIDDEEVKRLIRE | |
| | | LDIADVPGIGNITAEKLKKLGINKLCDTLSIEFDKLKGMIGEAKAKYLISLARDEYNEPI | |
| | | RTRVRKSIGRIVTMKRNSRNLEEIKPYLFRAIEESYYKLDKRIPKAIHVVAVTEDLDIVS | |
| | | RGRTFPHGISKETAYSESVKLLQKILEEDERKIRRIGVRFSKFIEAIGL | |
| 191 | Protein | MIVLFVDFDYFYAQVEEVLNPSLKGKPVVVCVFSGRFEDSGAVATANYEARKFGVKA | Dpo4-Δ6 |
| | | GIPIVEAKKILPNAVYLPMRKEVYQQVSCRIMNLLREYSEKIEIASIDEAYLDISDKVRD | S86C/V203C, |
| | | YREAYNLGLEIKNKILEKEKITVTVGISKNKVFAKIAADMAKPNGIKVIDDEEVKRLIRE | |
| | | LDIADVPGIGNITAEKLKKLGINKLCDTLSIEFDKLKGMIGEAKAKYLISLARDEYNEPI | |
| | | RTRVRKSIGRIVTMKRNSRNLEEIKPYLFRAIEESYYKLDKRIPKAIHVVAVTEDLDIVS | |
| | | RGRTFPHGISKETAYSESVKLLQKILEEDERKIRRIGVRFSKFIEAIGL | |
| 192 | Protein | MIVLFVDFDYFYAQVEEVLNPSLKGKPVVVSVFSGRFEDSGAVATANYEARKFGVKA | Dpo4-Δ6 |
| | | GIPIVEAKKILPNAVYLPMRKEVYQQVSSRIMNLLREYSEKIEIASIDEAYLDISDKVRD | C31S/V203C,, |
| | | YREAYNLGLEIKNKILEKEKITVTVGISKNKVFAKIAADMAKPNGIKVIDDEEVKRLIRE | |
| | | LDIADVPGIGNITAEKLKKLGINKLCDTLSIEFDKLKGMIGEAKAKYLISLARDEYNEPI | |
| | | RTRVRKSIGRIVTMKRNSRNLEEIKPYLFRAIEESYYKLDKRIPKAIHVVAVTEDLDIVS | |
| | | RGRTFPHGISKETAYSESVKLLQKILEEDERKIRRIGVRFSKFIEAIGL | |
| 193 | Protein | MIVLFVDFDYFYAQVEEVLNPSLKGKPVVVCVFSGRFEDSGAVATANYEARKFGVKA | Dpo4-Δ6 |
| | | GIPIVEAKKILPNAVYLPGRKEVYQQVSSRIMNLLREYSEKIEIASIDEAYLDISDKVRDY | M76G/V203C, |
| | | REAYNLGLEIKNKILEKEKITVTVGISKNKVFAKIAADMAKPNGIKVIDDEEVKRLIREL | |
| | | DIADVPGIGNITAEKLKKLGINKLCDTLSIEFDKLKGMIGEAKAKYLISLARDEYNEPIR | |
| | | TRVRKSIGRIVTMKRNSRNLEEIKPYLFRAIEESYYKLDKRIPKAIHVVAVTEDLDIVSR | |
| | | GRTFPHGISKETAYSESVKLLQKILEEDERKIRRIGVRFSKFIEAIGL | |
| 194 | Protein | MIVLFVDFDYFYAQVEEVLNPSLKGKPVVVCVFSGRFEDSGAVATANYEARKFGVKA | Dpo4-Δ6 |
| | | GIPIVEAKKILPNAVYLPARKEVYQQVSSRIMNLLREYSEKIEIASIDEAYLDISDKVRDY | M76A/V203C, |
| | | REAYNLGLEIKNKILEKEKITVTVGISKNKVFAKIAADMAKPNGIKVIDDEEVKRLIREL | |
| | | DIADVPGIGNITAEKLKKLGINKLCDTLSIEFDKLKGMIGEAKAKYLISLARDEYNEPIR | |
| | | TRVRKSIGRIVTMKRNSRNLEEIKPYLFRAIEESYYKLDKRIPKAIHVVAVTEDLDIVSR | |
| | | GRTFPHGISKETAYSESVKLLQKILEEDERKIRRIGVRFSKFIEAIGL | |
| 195 | Protein | MIVLFVDFDYFYAQVEEVLNPSLKGKPVVVCVFSGRFEDSGAVATANYEARKFGVKA | Dpo4-Δ6 |
| | | GIPIVEAKKCLPNAVYLPMRKEVYQQVSSRIMNLLREYSEKIEIASIDEAYLDISDKVRD | I67C/V203C, |
| | | YREAYNLGLEIKNKILEKEKITVTVGISKNKVFAKIAADMAKPNGIKVIDDEEVKRLIRE | |
| | | LDIADVPGIGNITAEKLKKLGINKLCDTLSIEFDKLKGMIGEAKAKYLISLARDEYNEPI | |
| | | RTRVRKSIGRIVTMKRNSRNLEEIKPYLFRAIEESYYKLDKRIPKAIHVVAVTEDLDIVS | |
| | | RGRTFPHGISKETAYSESVKLLQKILEEDERKIRRIGVRFSKFIEAIGL | |
| 196 | Protein | MIVLFVDFDYFYAQVEEVLNPSLKGKPVVVCVFSGRFEDSGAVATANYEARKFGVKA | Dpo4-Δ6 |
| | | GIPIVEAKKILPNAVYLPMRKEVYQQVSGRIMNLLREYSEKIEIASIDEAYLDISDKVRD | S86G/V203C, |
| | | YREAYNLGLEIKNKILEKEKITVTVGISKNKVFAKIAADMAKPNGIKVIDDEEVKRLIRE | |
| | | LDIADVPGIGNITAEKLKKLGINKLCDTLSIEFDKLKGMIGEAKAKYLISLARDEYNEPI | |
| | | RTRVRKSIGRIVTMKRNSRNLEEIKPYLFRAIEESYYKLDKRIPKAIHVVAVTEDLDIVS | |
| | | RGRTFPHGISKETAYSESVKLLQKILEEDERKIRRIGVRFSKFIEAIGL | |
| 197 | Protein | MIVLFVDFDYFYAQVEEVLNPSLKGKPVVVCVFSGRFEDSGAVATANYEARKFGVKA | Dpo4-Δ6 |
| | | GIPIVEAKKILPNAVYLPMRKEVYQQVSSRIMNLLREYGEKIEIASIDEAYLDISDKVRD | S96G/V203C, |
| | | YREAYNLGLEIKNKILEKEKITVTVGISKNKVFAKIAADMAKPNGIKVIDDEEVKRLIRE | |
| | | LDIADVPGIGNITAEKLKKLGINKLCDTLSIEFDKLKGMIGEAKAKYLISLARDEYNEPI | |
| | | RTRVRKSIGRIVTMKRNSRNLEEIKPYLFRAIEESYYKLDKRIPKAIHVVAVTEDLDIVS | |
| | | RGRTFPHGISKETAYSESVKLLQKILEEDERKIRRIGVRFSKFIEAIGL | |
| 198 | Protein | MIVLFVDFDYFYAQVEEVLNPSLKGKPVVVSVFSGRFEDSGAVATANYEARKFGVKA | Dpo4-Δ6 |
| | | GIPIVEAKKILPNAVYLPMRKEVYQQVSSRIMNLLREYSEKIEIASIDEAYLDISDKVRD | C31S/A155C, |
| | | YREAYNLGLEIKNKILEKEKITVTVGISKNKVFAKIACDMAKPNGIKVIDDEEVKRLIRE | |
| | | LDIADVPGIGNITAEKLKKLGINKLVDTLSIEFDKLKGMIGEAKAKYLISLARDEYNEPI | |
| | | RTRVRKSIGRIVTMKRNSRNLEEIKPYLFRAIEESYYKLDKRIPKAIHVVAVTEDLDIVS | |
| | | RGRTFPHGISKETAYSESVKLLQKILEEDERKIRRIGVRFSKFIEAIGL | |
| 199 | Protein | MIVLFVDFDYFYAQVEEVLNPSLKGKPVVVSVFSGRFEDSGAVATANYEARKFGVKA | Dpo4-Δ6 |
| | | GIPIVEAKKILPNAVYLPMRKEVYQQVSSRIMNLLREYSEKIEIASIDEAYLDISDKVRD | C31S/V203C, |
| | | YREAYNLGLEIKNKILEKEKITVTVGISKNKVFAKIAADMAKPNGIKVIDDEEVKRLIRE | |
| | | LDIADVPGIGNITAEKLKKLGINKLCDTLSIEFDKLKGMIGEAKAKYLISLARDEYNEPI | |
| | | RTRVRKSIGRIVTMKRNSRNLEEIKPYLFRAIEESYYKLDKRIPKAIHVVAVTEDLDIVS | |
| | | RGRTFPHGISKETAYSESVKLLQKILEEDERKIRRIGVRFSKFIEAIGL | |
| 200 | Protein | MIVLFVDFDYFYAQVEEVLNPSLKGKPVVVSVFSGRFEDSGAVATANYEARKFGVKA | Dpo4-Δ6 |
| | | GIPIVEAKKILPNAVYLPMRKEVYQQVSSRIMNLLREYSEKIEIASIDEAYLDISDKVRD | C31S/A155C/V203C, |
| | | YREAYNLGLEIKNKILEKEKITVTVGISKNKVFAKIACDMAKPNGIKVIDDEEVKRLIRE | |
| | | LDIADVPGIGNITAEKLKKLGINKLCDTLSIEFDKLKGMIGEAKAKYLISLARDEYNEPI | |
| | | RTRVRKSIGRIVTMKRNSRNLEEIKPYLFRAIEESYYKLDKRIPKAIHVVAVTEDLDIVS | |
| | | RGRTFPHGISKETAYSESVKLLQKILEEDERKIRRIGVRFSKFIEAIGL | |
| 201 | Protein | MIVLFVDFDYFYAQVEEVLNPSLKGKPVVVCVFSGRFEDSGAVATANYEARKFGVKA | Dpo4-Δ6, |
| | | GIPIVEAKKILPNAVYLPMRKEVYQQVSSRIMNLLREYSEKIEIASIDEAYLDISDKVRD | |
| | | YREAYNLGLEIKNKILEKEKITVTVGISKNKVFAKIAADMAKPNGIKVIDDEEVKRLIRE | |
| | | LDIADVPGIGNITAEKLKKLGINKLVDTLSIEFDKLKGMIGEAKAKYLISLARDEYNEPI | |
| | | RTRVRKSIGRIVTMKRNSRNLEEIKPYLFRAIEESYYKLDKRIPKAIHVVAVTEDLDIVS | |
| | | RGRTFPHGISKETAYSESVKLLQKILEEDERKIRRIGVRFSKFIEA | |
| 202 | Protein | MIVLFVDFDYFYAQVEEVLNPSLKGKPVVVCVFSGRFEDSGAVATANYEARKFGVKA | Dpo4-Δ6 A155C, |
| | | GIPIVEAKKILPNAVYLPMRKEVYQQVSSRIMNLLREYSEKIEIASIDEAYLDISDKVRD | |
| | | YREAYNLGLEIKNKILEKEKITVTVGISKNKVFAKIACDMAKPNGIKVIDDEEVKRLIRE | |
| | | LDIADVPGIGNITAEKLKKLGINKLVDTLSIEFDKLKGMIGEAKAKYLISLARDEYNEPI | |
| | | RTRVRKSIGRIVTMKRNSRNLEEIKPYLFRAIEESYYKLDKRIPKAIHVVAVTEDLDIVS | |
| | | RGRTFPHGISKETAYSESVKLLQKILEEDERKIRRIGVRFSKFIEA | |
| 203 | Protein | MIVLFVDFDYFYAQVEEVLNPSLKGKPVVVCVFSGRFEDSGAVATANYEARKFGVKA | Dpo4-Δ6 V203C, |
| | | GIPIVEAKKILPNAVYLPMRKEVYQQVSSRIMNLLREYSEKIEIASIDEAYLDISDKVRD | |
| | | YREAYNLGLEIKNKILEKEKITVTVGISKNKVFAKIAADMAKPNGIKVIDDEEVKRLIRE | |
| | | LDIADVPGIGNITAEKLKKLGINKLCDTLSIEFDKLKGMIGEAKAKYLISLARDEYNEPI | |
| | | RTRVRKSIGRIVTMKRNSRNLEEIKPYLFRAIEESYYKLDKRIPKAIHVVAVTEDLDIVS | |
| | | RGRTFPHGISKETAYSESVKLLQKILEEDERKIRRIGVRFSKFIEA | |
| 204 | Protein | MIVLFVDFDYFYAQVEEVLNPSLKGKPVVVCVFSGRFEDSGAVATANYEARKFGVKA | Dpo4-Δ6 |
| | | GIPIVEAKKILPNAVYLPMRKEVYQQVSSRIMNLLREYSEKIEIASIDEAYLDISDKVRD | A155C/V203C, |
| | | YREAYNLGLEIKNKILEKEKITVTVGISKNKVFAKIACDMAKPNGIKVIDDEEVKRLIRE | |
| | | LDIADVPGIGNITAEKLKKLGINKLCDTLSIEFDKLKGMIGEAKAKYLISLARDEYNEPI | |
| | | RTRVRKSIGRIVTMKRNSRNLEEIKPYLFRAIEESYYKLDKRIPKAIHVVAVTEDLDIVS | |
| | | RGRTFPHGISKETAYSESVKLLQKILEEDERKIRRIGVRFSKFIEA | |
| 205 | Protein | MIVLFVDFDYFYAQVEEVLNPSLKGKPVVVSVFSGRFEDSGAVATANYEARKFGVKA | Dpo4-Δ6 C31S, |
| | | GIPIVEAKKILPNAVYLPMRKEVYQQVSSRIMNLLREYSEKIEIASIDEAYLDISDKVRD | |
| | | YREAYNLGLEIKNKILEKEKITVTVGISKNKVFAKIAADMAKPNGIKVIDDEEVKRLIRE | |
| | | LDIADVPGIGNITAEKLKKLGINKLVDTLSIEFDKLKGMIGEAKAKYLISLARDEYNEPI | |
| | | RTRVRKSIGRIVTMKRNSRNLEEIKPYLFRAIEESYYKLDKRIPKAIHVVAVTEDLDIVS | |
| | | RGRTFPHGISKETAYSESVKLLQKILEEDERKIRRIGVRFSKFIEA | |
| 206 | Protein | MIVLFVDFDYFYAQVEEVLNPSLKGKPVVVCVFSGRFEDSGAVATANYEARKFGVKA | Dpo4-Δ6 S85C, |
| | | GIPIVEAKKILPNAVYLPMRKEVYQQVCSRIMNLLREYSEKIEIASIDEAYLDISDKVRD | |
| | | YREAYNLGLEIKNKILEKEKITVTVGISKNKVFAKIAADMAKPNGIKVIDDEEVKRLIRE | |
| | | LDIADVPGIGNITAEKLKKLGINKLVDTLSIEFDKLKGMIGEAKAKYLISLARDEYNEPI | |
| | | RTRVRKSIGRIVTMKRNSRNLEEIKPYLFRAIEESYYKLDKRIPKAIHVVAVTEDLDIVS | |
| | | RGRTFPHGISKETAYSESVKLLQKILEEDERKIRRIGVRFSKFIEA | |
| 207 | Protein | MIVLFVDFDYFYAQVEEVLNPSLKGKPVVVCVFSGRFEDSGAVATANYEARKFGVKA | Dpo4-Δ6 S86C, |
| | | GIPIVEAKKILPNAVYLPMRKEVYQQVSCRIMNLLREYSEKIEIASIDEAYLDISDKVRD | |
| | | YREAYNLGLEIKNKILEKEKITVTVGISKNKVFAKIAADMAKPNGIKVIDDEEVKRLIRE | |
| | | LDIADVPGIGNITAEKLKKLGINKLVDTLSIEFDKLKGMIGEAKAKYLISLARDEYNEPI | |
| | | RTRVRKSIGRIVTMKRNSRNLEEIKPYLFRAIEESYYKLDKRIPKAIHVVAVTEDLDIVS | |
| | | RGRTFPHGISKETAYSESVKLLQKILEEDERKIRRIGVRFSKFIEA | |
| 208 | Protein | MIVLFVDFDYFYAQVEEVLNPSLKGKPVVVCVFSGRFEDSGAVATANYEARKFGVKA | Dpo4-Δ6 S96C, |
| | | GIPIVEAKKILPNAVYLPMRKEVYQQVSSRIMNLLREYCEKIEIASIDEAYLDISDKVRD | |
| | | YREAYNLGLEIKNKILEKEKITVTVGISKNKVFAKIAADMAKPNGIKVIDDEEVKRLIRE | |
| | | LDIADVPGIGNITAEKLKKLGINKLVDTLSIEFDKLKGMIGEAKAKYLISLARDEYNEPI | |
| | | RTRVRKSIGRIVTMKRNSRNLEEIKPYLFRAIEESYYKLDKRIPKAIHVVAVTEDLDIVS | |
| | | RGRTFPHGISKETAYSESVKLLQKILEEDERKIRRIGVRFSKFIEA | |
| 209 | Protein | MIVLFVDFDYFYAQVEEVLNPSLKGKPVVVCVFSGRFEDSGAVATANYEARKFGVKA | Dpo4-Δ6 A71C, |
| | | GIPIVEAKKILPNCVYLPMRKEVYQQVSSRIMNLLREYSEKIEIASIDEAYLDISDKVRD | |
| | | YREAYNLGLEIKNKILEKEKITVTVGISKNKVFAKIAADMAKPNGIKVIDDEEVKRLIRE | |
| | | LDIADVPGIGNITAEKLKKLGINKLVDTLSIEFDKLKGMIGEAKAKYLISLARDEYNEPI | |
| | | RTRVRKSIGRIVTMKRNSRNLEEIKPYLFRAIEESYYKLDKRIPKAIHVVAVTEDLDIVS | |
| | | RGRTFPHGISKETAYSESVKLLQKILEEDERKIRRIGVRFSKFIEA | |
| 210 | Protein | MIVLFVDFDYFYAQVEEVLNPSLKGKPVVVCVFSGRFEDSGAVATANYEARKFGVKA | Dpo4-Δ6 M76G, |
| | | GIPIVEAKKILPNAVYLPGRKEVYQQVSSRIMNLLREYSEKIEIASIDEAYLDISDKVRDY | |
| | | REAYNLGLEIKNKILEKEKITVTVGISKNKVFAKIAADMAKPNGIKVIDDEEVKRLIREL | |
| | | DIADVPGIGNITAEKLKKLGINKLVDTLSIEFDKLKGMIGEAKAKYLISLARDEYNEPIR | |
| | | TRVRKSIGRIVTMKRNSRNLEEIKPYLFRAIEESYYKLDKRIPKAIHVVAVTEDLDIVSR | |
| | | GRTFPHGISKETAYSESVKLLQKILEEDERKIRRIGVRFSKFIEA | |
| 211 | Protein | MIVLFVDFDYFYAQVEEVLNPSLKGKPVVVCVFSGRFEDSGAVATANYEARKFGVKA | Dpo4-Δ6 M76A, |
| | | GIPIVEAKKILPNAVYLPARKEVYQQVSSRIMNLLREYSEKIEIASIDEAYLDISDKVRDY | |
| | | REAYNLGLEIKNKILEKEKITVTVGISKNKVFAKIAADMAKPNGIKVIDDEEVKRLIREL | |
| | | DIADVPGIGNITAEKLKKLGINKLVDTLSIEFDKLKGMIGEAKAKYLISLARDEYNEPIR | |
| | | TRVRKSIGRIVTMKRNSRNLEEIKPYLFRAIEESYYKLDKRIPKAIHVVAVTEDLDIVSR | |
| | | GRTFPHGISKETAYSESVKLLQKILEEDERKIRRIGVRFSKFIEA | |
| 212 | Protein | MIVLFVDFDYFYAQVEEVLNPSLKGKPVVVCVFSGRFEDSGAVATANYEARKFGVKA | Dpo4-Δ6 I67C, |
| | | GIPIVEAKKCLPNAVYLPMRKEVYQQVSSRIMNLLREYSEKIEIASIDEAYLDISDKVRD | |
| | | YREAYNLGLEIKNKILEKEKITVTVGISKNKVFAKIAADMAKPNGIKVIDDEEVKRLIRE | |
| | | LDIADVPGIGNITAEKLKKLGINKLVDTLSIEFDKLKGMIGEAKAKYLISLARDEYNEPI | |
| | | RTRVRKSIGRIVTMKRNSRNLEEIKPYLFRAIEESYYKLDKRIPKAIHVVAVTEDLDIVS | |
| | | RGRTFPHGISKETAYSESVKLLQKILEEDERKIRRIGVRFSKFIEA | |
| 213 | Protein | MIVLFVDFDYFYAQVEEVLNPSLKGKPVVVCVFSGRFEDSGAVATANYEARKFGVKA | Dpo4-Δ6 S86G, |
| | | GIPIVEAKKILPNAVYLPMRKEVYQQVSGRIMNLLREYSEKIEIASIDEAYLDISDKVRD | |
| | | YREAYNLGLEIKNKILEKEKITVTVGISKNKVFAKIAADMAKPNGIKVIDDEEVKRLIRE | |
| | | LDIADVPGIGNITAEKLKKLGINKLVDTLSIEFDKLKGMIGEAKAKYLISLARDEYNEPI | |
| | | RTRVRKSIGRIVTMKRNSRNLEEIKPYLFRAIEESYYKLDKRIPKAIHVVAVTEDLDIVS | |
| | | RGRTFPHGISKETAYSESVKLLQKILEEDERKIRRIGVRFSKFIEA | |
| 214 | Protein | MIVLFVDFDYFYAQVEEVLNPSLKGKPVVVCVFSGRFEDSGAVATANYEARKFGVKA | Dpo4-Δ6 |
| | | GIPIVEAKKILPNCVYLPMRKEVYQQVSSRIMNLLREYSEKIEIASIDEAYLDISDKVRD | A71C/A155C/V203C, |
| | | YREAYNLGLEIKNKILEKEKITVTVGISKNKVFAKIACDMAKPNGIKVIDDEEVKRLIRE | |
| | | LDIADVPGIGNITAEKLKKLGINKLCDTLSIEFDKLKGMIGEAKAKYLISLARDEYNEPI | |
| | | RTRVRKSIGRIVTMKRNSRNLEEIKPYLFRAIEESYYKLDKRIPKAIHVVAVTEDLDIVS | |
| | | RGRTFPHGISKETAYSESVKLLQKILEEDERKIRRIGVRFSKFIEA | |
| 215 | Protein | MIVLFVDFDYFYAQVEEVLNPSLKGKPVVVCVFSGRFEDSGAVATANYEARKFGVKA | Dpo4-Δ6 |
| | | GIPIVEAKKILPNAVYLPMRKEVYQQVSCRIMNLLREYSEKIEIASIDEAYLDISDKVRD | S86C/A155C/V203C, |
| | | YREAYNLGLEIKNKILEKEKITVTVGISKNKVFAKIACDMAKPNGIKVIDDEEVKRLIRE | |
| | | LDIADVPGIGNITAEKLKKLGINKLCDTLSIEFDKLKGMIGEAKAKYLISLARDEYNEPI | |
| | | RTRVRKSIGRIVTMKRNSRNLEEIKPYLFRAIEESYYKLDKRIPKAIHVVAVTEDLDIVS | |
| | | RGRTFPHGISKETAYSESVKLLQKILEEDERKIRRIGVRFSKFIEA | |
| 216 | Protein | MIVLFVDFDYFYAQVEEVLNPSLKGKPVVVSVFSGRFEDSGAVATANYEARKFGVKA | Dpo4-Δ6 |
| | | GIPIVEAKKILPNAVYLPMRKEVYQQVSSRIMNLLREYSEKIEIASIDEAYLDISDKVRD | C31S/A155C/V203C, |
| | | YREAYNLGLEIKNKILEKEKITVTVGISKNKVFAKIACDMAKPNGIKVIDDEEVKRLIRE | |
| | | LDIADVPGIGNITAEKLKKLGINKLCDTLSIEFDKLKGMIGEAKAKYLISLARDEYNEPI | |
| | | RTRVRKSIGRIVTMKRNSRNLEEIKPYLFRAIEESYYKLDKRIPKAIHVVAVTEDLDIVS | |
| | | RGRTFPHGISKETAYSESVKLLQKILEEDERKIRRIGVRFSKFIEA | |
| 217 | Protein | MIVLFVDFDYFYAQVEEVLNPSLKGKPVVVCVFSGRFEDSGAVATANYEARKFGVKA | Dpo4-Δ6 |
| | | GIPIVEAKKILPNAVYLPGRKEVYQQVSSRIMNLLREYSEKIEIASIDEAYLDISDKVRDY | M76G/A155C/V203C, |
| | | REAYNLGLEIKNKILEKEKITVTVGISKNKVFAKIACDMAKPNGIKVIDDEEVKRLIREL | |
| | | DIADVPGIGNITAEKLKKLGINKLCDTLSIEFDKLKGMIGEAKAKYLISLARDEYNEPIR | |
| | | TRVRKSIGRIVTMKRNSRNLEEIKPYLFRAIEESYYKLDKRIPKAIHVVAVTEDLDIVSR | |
| | | GRTFPHGISKETAYSESVKLLQKILEEDERKIRRIGVRFSKFIEA | |
| 218 | Protein | MIVLFVDFDYFYAQVEEVLNPSLKGKPVVVCVFSGRFEDSGAVATANYEARKFGVKA | Dpo4-Δ6 |
| | | GIPIVEAKKILPNAVYLPARKEVYQQVSSRIMNLLREYSEKIEIASIDEAYLDISDKVRDY | M76A/A155C/V203C, |
| | | REAYNLGLEIKNKILEKEKITVTVGISKNKVFAKIACDMAKPNGIKVIDDEEVKRLIREL | |
| | | DIADVPGIGNITAEKLKKLGINKLCDTLSIEFDKLKGMIGEAKAKYLISLARDEYNEPIR | |
| | | TRVRKSIGRIVTMKRNSRNLEEIKPYLFRAIEESYYKLDKRIPKAIHVVAVTEDLDIVSR | |
| | | GRTFPHGISKETAYSESVKLLQKILEEDERKIRRIGVRFSKFIEA | |
| 219 | Protein | MIVLFVDFDYFYAQVEEVLNPSLKGKPVVVCVFSGRFEDSGAVATANYEARKFGVKA | Dpo4-Δ6 |
| | | GIPIVEAKKCLPNAVYLPMRKEVYQQVSSRIMNLLREYSEKIEIASIDEAYLDISDKVRD | 167C/A155C/V203C, |
| | | YREAYNLGLEIKNKILEKEKITVTVGISKNKVFAKIACDMAKPNGIKVIDDEEVKRLIRE | |
| | | LDIADVPGIGNITAEKLKKLGINKLCDTLSIEFDKLKGMIGEAKAKYLISLARDEYNEPI | |
| | | RTRVRKSIGRIVTMKRNSRNLEEIKPYLFRAIEESYYKLDKRIPKAIHVVAVTEDLDIVS | |
| | | RGRTFPHGISKETAYSESVKLLQKILEEDERKIRRIGVRFSKFIEA | |
| 220 | Protein | MIVLFVDFDYFYAQVEEVLNPSLKGKPVVVCVFSGRFEDSGAVATANYEARKFGVKA | Dpo4-Δ6 |
| | | GIPIVEAKKILPNAVYLPMRKEVYQQVSGRIMNLLREYSEKIEIASIDEAYLDISDKVRD | S86G/A155C/V203C, |
| | | YREAYNLGLEIKNKILEKEKITVTVGISKNKVFAKIACDMAKPNGIKVIDDEEVKRLIRE | |
| | | LDIADVPGIGNITAEKLKKLGINKLCDTLSIEFDKLKGMIGEAKAKYLISLARDEYNEPI | |
| | | RTRVRKSIGRIVTMKRNSRNLEEIKPYLFRAIEESYYKLDKRIPKAIHVVAVTEDLDIVS | |
| | | RGRTFPHGISKETAYSESVKLLQKILEEDERKIRRIGVRFSKFIEA | |
| 221 | Protein | MIVLFVDFDYFYAQVEEVLNPSLKGKPVVVCVFSGRFEDSGAVATANYEARKFGVKA | Dpo4-Δ6 |
| | | GIPIVEAKKILPNAVYLPMRKEVYQQVSSRIMNLLREYGEKIEIASIDEAYLDISDKVRD | S96G/A155C/V203C, |
| | | YREAYNLGLEIKNKILEKEKITVTVGISKNKVFAKIACDMAKPNGIKVIDDEEVKRLIRE | |
| | | LDIADVPGIGNITAEKLKKLGINKLCDTLSIEFDKLKGMIGEAKAKYLISLARDEYNEPI | |
| | | RTRVRKSIGRIVTMKRNSRNLEEIKPYLFRAIEESYYKLDKRIPKAIHVVAVTEDLDIVS | |
| | | RGRTFPHGISKETAYSESVKLLQKILEEDERKIRRIGVRFSKFIEA | |
| 222 | Protein | MIVLFVDFDYFYAQVEEVLNPSLKGKPVVVCVFSGRFEDSGAVATANYEARKFGVKA | Dpo4-Δ6 |
| | | GIPIVEAKKILPNCVYLPMRKEVYQQVSSRIMNLLREYSEKIEIASIDEAYLDISDKVRD | A71C/A155C, |
| | | YREAYNLGLEIKNKILEKEKITVTVGISKNKVFAKIACDMAKPNGIKVIDDEEVKRLIRE | |
| | | LDIADVPGIGNITAEKLKKLGINKLVDTLSIEFDKLKGMIGEAKAKYLISLARDEYNEPI | |
| | | RTRVRKSIGRIVTMKRNSRNLEEIKPYLFRAIEESYYKLDKRIPKAIHVVAVTEDLDIVS | |
| | | RGRTFPHGISKETAYSESVKLLQKILEEDERKIRRIGVRFSKFIEA | |
| 223 | Protein | MIVLFVDFDYFYAQVEEVLNPSLKGKPVVVCVFSGRFEDSGAVATANYEARKFGVKA | Dpo4-Δ6 |
| | | GIPIVEAKKILPNAVYLPMRKEVYQQVSCRIMNLLREYSEKIEIASIDEAYLDISDKVRD | S86C/A155C/,, |
| | | YREAYNLGLEIKNKILEKEKITVTVGISKNKVFAKIACDMAKPNGIKVIDDEEVKRLIRE | |
| | | LDIADVPGIGNITAEKLKKLGINKLVDTLSIEFDKLKGMIGEAKAKYLISLARDEYNEPI | |
| | | RTRVRKSIGRIVTMKRNSRNLEEIKPYLFRAIEESYYKLDKRIPKAIHVVAVTEDLDIVS | |
| | | RGRTFPHGISKETAYSESVKLLQKILEEDERKIRRIGVRFSKFIEA | |
| 224 | Protein | MIVLFVDFDYFYAQVEEVLNPSLKGKPVVVSVFSGRFEDSGAVATANYEARKFGVKA | Dpo4-Δ6 |
| | | GIPIVEAKKILPNAVYLPMRKEVYQQVSSRIMNLLREYSEKIEIASIDEAYLDISDKVRD | C31S/A155C, |
| | | YREAYNLGLEIKNKILEKEKITVTVGISKNKVFAKIACDMAKPNGIKVIDDEEVKRLIRE | |
| | | LDIADVPGIGNITAEKLKKLGINKLVDTLSIEFDKLKGMIGEAKAKYLISLARDEYNEPI | |
| | | RTRVRKSIGRIVTMKRNSRNLEEIKPYLFRAIEESYYKLDKRIPKAIHVVAVTEDLDIVS | |
| | | RGRTFPHGISKETAYSESVKLLQKILEEDERKIRRIGVRFSKFIEA | |
| 225 | Protein | MIVLFVDFDYFYAQVEEVLNPSLKGKPVVVCVFSGRFEDSGAVATANYEARKFGVKA | Dpo4-Δ6 |
| | | GIPIVEAKKILPNAVYLPGRKEVYQQVSSRIMNLLREYSEKIEIASIDEAYLDISDKVRDY | M76G/A155C, |
| | | REAYNLGLEIKNKILEKEKITVTVGISKNKVFAKIACDMAKPNGIKVIDDEEVKRLIREL | |
| | | DIADVPGIGNITAEKLKKLGINKLVDTLSIEFDKLKGMIGEAKAKYLISLARDEYNEPIR | |
| | | TRVRKSIGRIVTMKRNSRNLEEIKPYLFRAIEESYYKLDKRIPKAIHVVAVTEDLDIVSR | |
| | | GRTFPHGISKETAYSESVKLLQKILEEDERKIRRIGVRFSKFIEA | |
| 226 | Protein | MIVLFVDFDYFYAQVEEVLNPSLKGKPVVVCVFSGRFEDSGAVATANYEARKFGVKA | Dpo4-Δ6 |
| | | GIPIVEAKKILPNAVYLPARKEVYQQVSSRIMNLLREYSEKIEIASIDEAYLDISDKVRDY | M76A/A155C, |
| | | REAYNLGLEIKNKILEKEKITVTVGISKNKVFAKIACDMAKPNGIKVIDDEEVKRLIREL | |
| | | DIADVPGIGNITAEKLKKLGINKLVDTLSIEFDKLKGMIGEAKAKYLISLARDEYNEPIR | |
| | | TRVRKSIGRIVTMKRNSRNLEEIKPYLFRAIEESYYKLDKRIPKAIHVVAVTEDLDIVSR | |
| | | GRTFPHGISKETAYSESVKLLQKILEEDERKIRRIGVRFSKFIEA | |
| 227 | Protein | MIVLFVDFDYFYAQVEEVLNPSLKGKPVVVCVFSGRFEDSGAVATANYEARKFGVKA | Dpo4-Δ6 |
| | | GIPIVEAKKCLPNAVYLPMRKEVYQQVSSRIMNLLREYSEKIEIASIDEAYLDISDKVRD | 167C/A155C, |
| | | YREAYNLGLEIKNKILEKEKITVTVGISKNKVFAKIACDMAKPNGIKVIDDEEVKRLIRE | |
| | | LDIADVPGIGNITAEKLKKLGINKLVDTLSIEFDKLKGMIGEAKAKYLISLARDEYNEPI | |
| | | RTRVRKSIGRIVTMKRNSRNLEEIKPYLFRAIEESYYKLDKRIPKAIHVVAVTEDLDIVS | |
| | | RGRTFPHGISKETAYSESVKLLQKILEEDERKIRRIGVRFSKFIEA | |
| 228 | Protein | MIVLFVDFDYFYAQVEEVLNPSLKGKPVVVCVFSGRFEDSGAVATANYEARKFGVKA | Dpo4-Δ6 |
| | | GIPIVEAKKILPNAVYLPMRKEVYQQVSGRIMNLLREYSEKIEIASIDEAYLDISDKVRD | S86G/A155C, |
| | | YREAYNLGLEIKNKILEKEKITVTVGISKNKVFAKIACDMAKPNGIKVIDDEEVKRLIRE | |
| | | LDIADVPGIGNITAEKLKKLGINKLVDTLSIEFDKLKGMIGEAKAKYLISLARDEYNEPI | |
| | | RTRVRKSIGRIVTMKRNSRNLEEIKPYLFRAIEESYYKLDKRIPKAIHVVAVTEDLDIVS | |
| | | RGRTFPHGISKETAYSESVKLLQKILEEDERKIRRIGVRFSKFIEA | |
| 229 | Protein | MIVLFVDFDYFYAQVEEVLNPSLKGKPVVVCVFSGRFEDSGAVATANYEARKFGVKA | Dpo4-Δ6 |
| | | GIPIVEAKKILPNAVYLPMRKEVYQQVSSRIMNLLREYGEKIEIASIDEAYLDISDKVRD | S96G/A155C, |
| | | YREAYNLGLEIKNKILEKEKITVTVGISKNKVFAKIACDMAKPNGIKVIDDEEVKRLIRE | |
| | | LDIADVPGIGNITAEKLKKLGINKLVDTLSIEFDKLKGMIGEAKAKYLISLARDEYNEPI | |
| | | RTRVRKSIGRIVTMKRNSRNLEEIKPYLFRAIEESYYKLDKRIPKAIHVVAVTEDLDIVS | |
| | | RGRTFPHGISKETAYSESVKLLQKILEEDERKIRRIGVRFSKFIEA | |
| 230 | Protein | MIVLFVDFDYFYAQVEEVLNPSLKGKPVVVCVFSGRFEDSGAVATANYEARKFGVKA | Dpo4-Δ6 |
| | | GIPIVEAKKILPNCVYLPMRKEVYQQVSSRIMNLLREYSEKIEIASIDEAYLDISDKVRD | A71C/V203C, |
| | | YREAYNLGLEIKNKILEKEKITVTVGISKNKVFAKIAADMAKPNGIKVIDDEEVKRLIRE | |
| | | LDIADVPGIGNITAEKLKKLGINKLCDTLSIEFDKLKGMIGEAKAKYLISLARDEYNEPI | |
| | | RTRVRKSIGRIVTMKRNSRNLEEIKPYLFRAIEESYYKLDKRIPKAIHVVAVTEDLDIVS | |
| | | RGRTFPHGISKETAYSESVKLLQKILEEDERKIRRIGVRFSKFIEA | |
| 231 | Protein | MIVLFVDFDYFYAQVEEVLNPSLKGKPVVVCVFSGRFEDSGAVATANYEARKFGVKA | Dpo4-Δ6 |
| | | GIPIVEAKKILPNAVYLPMRKEVYQQVSCRIMNLLREYSEKIEIASIDEAYLDISDKVRD | S86C/V203C, |
| | | YREAYNLGLEIKNKILEKEKITVTVGISKNKVFAKIAADMAKPNGIKVIDDEEVKRLIRE | |
| | | LDIADVPGIGNITAEKLKKLGINKLCDTLSIEFDKLKGMIGEAKAKYLISLARDEYNEPI | |
| | | RTRVRKSIGRIVTMKRNSRNLEEIKPYLFRAIEESYYKLDKRIPKAIHVVAVTEDLDIVS | |
| | | RGRTFPHGISKETAYSESVKLLQKILEEDERKIRRIGVRFSKFIEA | |
| 232 | Protein | MIVLFVDFDYFYAQVEEVLNPSLKGKPVVVSVFSGRFEDSGAVATANYEARKFGVKA | Dpo4-Δ6 |
| | | GIPIVEAKKILPNAVYLPMRKEVYQQVSSRIMNLLREYSEKIEIASIDEAYLDISDKVRD | C31S/V203C,, |
| | | YREAYNLGLEIKNKILEKEKITVTVGISKNKVFAKIAADMAKPNGIKVIDDEEVKRLIRE | |
| | | LDIADVPGIGNITAEKLKKLGINKLCDTLSIEFDKLKGMIGEAKAKYLISLARDEYNEPI | |
| | | RTRVRKSIGRIVTMKRNSRNLEEIKPYLFRAIEESYYKLDKRIPKAIHVVAVTEDLDIVS | |
| | | RGRTFPHGISKETAYSESVKLLQKILEEDERKIRRIGVRFSKFIEA | |
| 233 | Protein | MIVLFVDFDYFYAQVEEVLNPSLKGKPVVVCVFSGRFEDSGAVATANYEARKFGVKA | Dpo4-Δ6 |
| | | GIPIVEAKKILPNAVYLPGRKEVYQQVSSRIMNLLREYSEKIEIASIDEAYLDISDKVRDY | M76G/V203C, |
| | | REAYNLGLEIKNKILEKEKITVTVGISKNKVFAKIAADMAKPNGIKVIDDEEVKRLIREL | |
| | | DIADVPGIGNITAEKLKKLGINKLCDTLSIEFDKLKGMIGEAKAKYLISLARDEYNEPIR | |
| | | TRVRKSIGRIVTMKRNSRNLEEIKPYLFRAIEESYYKLDKRIPKAIHVVAVTEDLDIVSR | |
| | | GRTFPHGISKETAYSESVKLLQKILEEDERKIRRIGVRFSKFIEA | |
| 234 | Protein | MIVLFVDFDYFYAQVEEVLNPSLKGKPVVVCVFSGRFEDSGAVATANYEARKFGVKA | Dpo4-Δ6 |
| | | GIPIVEAKKILPNAVYLPARKEVYQQVSSRIMNLLREYSEKIEIASIDEAYLDISDKVRDY | M76A/V203C, |
| | | REAYNLGLEIKNKILEKEKITVTVGISKNKVFAKIAADMAKPNGIKVIDDEEVKRLIREL | |
| | | DIADVPGIGNITAEKLKKLGINKLCDTLSIEFDKLKGMIGEAKAKYLISLARDEYNEPIR | |
| | | TRVRKSIGRIVTMKRNSRNLEEIKPYLFRAIEESYYKLDKRIPKAIHVVAVTEDLDIVSR | |
| | | GRTFPHGISKETAYSESVKLLQKILEEDERKIRRIGVRFSKFIEA | |
| 235 | Protein | MIVLFVDFDYFYAQVEEVLNPSLKGKPVVVCVFSGRFEDSGAVATANYEARKFGVKA | Dpo4-Δ6 |
| | | GIPIVEAKKCLPNAVYLPMRKEVYQQVSSRIMNLLREYSEKIEIASIDEAYLDISDKVRD | I67C/V203C, |
| | | YREAYNLGLEIKNKILEKEKITVTVGISKNKVFAKIAADMAKPNGIKVIDDEEVKRLIRE | |
| | | LDIADVPGIGNITAEKLKKLGINKLCDTLSIEFDKLKGMIGEAKAKYLISLARDEYNEPI | |
| | | RTRVRKSIGRIVTMKRNSRNLEEIKPYLFRAIEESYYKLDKRIPKAIHVVAVTEDLDIVS | |
| | | RGRTFPHGISKETAYSESVKLLQKILEEDERKIRRIGVRFSKFIEA | |
| 236 | Protein | MIVLFVDFDYFYAQVEEVLNPSLKGKPVVVCVFSGRFEDSGAVATANYEARKFGVKA | Dpo4-Δ6 |
| | | GIPIVEAKKILPNAVYLPMRKEVYQQVSGRIMNLLREYSEKIEIASIDEAYLDISDKVRD | S86G/V203C, |
| | | YREAYNLGLEIKNKILEKEKITVTVGISKNKVFAKIAADMAKPNGIKVIDDEEVKRLIRE | |
| | | LDIADVPGIGNITAEKLKKLGINKLCDTLSIEFDKLKGMIGEAKAKYLISLARDEYNEPI | |
| | | RTRVRKSIGRIVTMKRNSRNLEEIKPYLFRAIEESYYKLDKRIPKAIHVVAVTEDLDIVS | |
| | | RGRTFPHGISKETAYSESVKLLQKILEEDERKIRRIGVRFSKFIEA | |
| 237 | Protein | MIVLFVDFDYFYAQVEEVLNPSLKGKPVVVCVFSGRFEDSGAVATANYEARKFGVKA | Dpo4-Δ6 |
| | | GIPIVEAKKILPNAVYLPMRKEVYQQVSSRIMNLLREYGEKIEIASIDEAYLDISDKVRD | S96G/V203C, |
| | | YREAYNLGLEIKNKILEKEKITVTVGISKNKVFAKIAADMAKPNGIKVIDDEEVKRLIRE | |
| | | LDIADVPGIGNITAEKLKKLGINKLCDTLSIEFDKLKGMIGEAKAKYLISLARDEYNEPI | |
| | | RTRVRKSIGRIVTMKRNSRNLEEIKPYLFRAIEESYYKLDKRIPKAIHVVAVTEDLDIVS | |
| | | RGRTFPHGISKETAYSESVKLLQKILEEDERKIRRIGVRFSKFIEA | |
| 238 | Protein | MIVLFVDFDYFYAQVEEVLNPSLKGKPVVVSVFSGRFEDSGAVATANYEARKFGVKA | Dpo4-Δ6 |
| | | GIPIVEAKKILPNAVYLPMRKEVYQQVSSRIMNLLREYSEKIEIASIDEAYLDISDKVRD | C31S/A155C, |
| | | YREAYNLGLEIKNKILEKEKITVTVGISKNKVFAKIACDMAKPNGIKVIDDEEVKRLIRE | |
| | | LDIADVPGIGNITAEKLKKLGINKLVDTLSIEFDKLKGMIGEAKAKYLISLARDEYNEPI | |
| | | RTRVRKSIGRIVTMKRNSRNLEEIKPYLFRAIEESYYKLDKRIPKAIHVVAVTEDLDIVS | |
| | | RGRTFPHGISKETAYSESVKLLQKILEEDERKIRRIGVRFSKFIEA | |
| 239 | Protein | MIVLFVDFDYFYAQVEEVLNPSLKGKPVVVSVFSGRFEDSGAVATANYEARKFGVKA | Dpo4-Δ6 |
| | | GIPIVEAKKILPNAVYLPMRKEVYQQVSSRIMNLLREYSEKIEIASIDEAYLDISDKVRD | C31S/V203C, |
| | | YREAYNLGLEIKNKILEKEKITVTVGISKNKVFAKIAADMAKPNGIKVIDDEEVKRLIRE | |
| | | LDIADVPGIGNITAEKLKKLGINKLCDTLSIEFDKLKGMIGEAKAKYLISLARDEYNEPI | |
| | | RTRVRKSIGRIVTMKRNSRNLEEIKPYLFRAIEESYYKLDKRIPKAIHVVAVTEDLDIVS | |
| | | RGRTFPHGISKETAYSESVKLLQKILEEDERKIRRIGVRFSKFIEA | |
| 240 | Protein | MIVLFVDFDYFYAQVEEVLNPSLKGKPVVVSVFSGRFEDSGAVATANYEARKFGVKA | Dpo4-Δ6 |
| | | GIPIVEAKKILPNAVYLPMRKEVYQQVSSRIMNLLREYSEKIEIASIDEAYLDISDKVRD | C31S/A155C/V203C, |
| | | YREAYNLGLEIKNKILEKEKITVTVGISKNKVFAKIACDMAKPNGIKVIDDEEVKRLIRE | |
| | | LDIADVPGIGNITAEKLKKLGINKLCDTLSIEFDKLKGMIGEAKAKYLISLARDEYNEPI | |
| | | RTRVRKSIGRIVTMKRNSRNLEEIKPYLFRAIEESYYKLDKRIPKAIHVVAVTEDLDIVS | |
| | | RGRTFPHGISKETAYSESVKLLQKILEEDERKIRRIGVRFSKFIEA | |
| 241 | Protein | MIVLFVDFDYFYAQVEEVLNPSLKGKPVVVCVFSGRFEDSGAVATANYEARKFGVKA | Dpo4-Δ12, |
| | | GIPIVEAKKILPNAVYLPMRKEVYQQVSSRIMNLLREYSEKIEIASIDEAYLDISDKVRD | |
| | | YREAYNLGLEIKNKILEKEKITVTVGISKNKVFAKIAADMAKPNGIKVIDDEEVKRLIRE | |
| | | LDIADVPGIGNITAEKLKKLGINKLVDTLSIEFDKLKGMIGEAKAKYLISLARDEYNEPI | |
| | | RTRVRKSIGRIVTMKRNSRNLEEIKPYLFRAIEESYYKLDKRIPKAIHVVAVTEDLDIVS | |
| | | RGRTFPHGISKETAYSESVKLLQKILEEDERKIRRIGVRFSKF | |
| 242 | Protein | MIVLFVDFDYFYAQVEEVLNPSLKGKPVVVCVFSGRFEDSGAVATANYEARKFGVKA | Dpo4-Δ12 A155C, |
| | | GIPIVEAKIULPNAVYLPMRKEVYQQVSSRIMNLLREYSEKIEIASIDEAYLDISDKVRD | |
| | | YREAYNLGLEIKNKILEKEKITVTVGISKNKVFAKIACDMAKPNGIKVIDDEEVKRLIRE | |
| | | LDIADVPGIGNITAEKLKKLGINKLVDTLSIEFDKLKGMIGEAKAKYLISLARDEYNEPI | |
| | | RTRVRKSIGRIVTMKRNSRNLEEIKPYLFRAIEESYYKLDKRIPKAIHVVAVTEDLDIVS | |
| | | RGRTFPHGISKETAYSESVKLLQKILEEDERKIRRIGVRFSKF | |
| 243 | Protein | MIVLFVDFDYFYAQVEEVLNPSLKGKPVVVCVFSGRFEDSGAVATANYEARKFGVKA | Dpo4-Δ12 V203C, |
| | | GIPIVEAKKILPNAVYLPMRKEVYQQVSSRIMNLLREYSEKIEIASIDEAYLDISDKVRD | |
| | | YREAYNLGLEIKNKILEKEKITVTVGISKNKVFAKIAADMAKPNGIKVIDDEEVKRLIRE | |
| | | LDIADVPGIGNITAEKLKKLGINKLCDTLSIEFDKLKGMIGEAKAKYLISLARDEYNEPI | |
| | | RTRVRKSIGRIVTMKRNSRNLEEIKPYLFRAIEESYYKLDKRIPKAIHVVAVTEDLDIVS | |
| | | RGRTFPHGISKETAYSESVKLLQKILEEDERKIRRIGVRFSKF | |
| 244 | Protein | MIVLFVDFDYFYAQVEEVLNPSLKGKPVVVCVFSGRFEDSGAVATANYEARKFGVKA | Dpo4-Δ12 |
| | | GIPIVEAKKILPNAVYLPMRKEVYQQVSSRIMNLLREYSEKIEIASIDEAYLDISDKVRD | A155C/V203C, |
| | | YREAYNLGLEIKNKILEKEKITVTVGISKNKVFAKIACDMAKPNGIKVIDDEEVKRLIRE | |
| | | LDIADVPGIGNITAEKLKKLGINKLCDTLSIEFDKLKGMIGEAKAKYLISLARDEYNEPI | |
| | | RTRVRKSIGRIVTMKRNSRNLEEIKPYLFRAIEESYYKLDKRIPKAIHVVAVTEDLDIVS | |
| | | RGRTFPHGISKETAYSESVKLLQKILEEDERKIRRIGVRFSKF | |
| 245 | Protein | MIVLFVDFDYFYAQVEEVLNPSLKGKPVVVSVFSGRFEDSGAVATANYEARKFGVKA | Dpo4-Δ12 C31S, |
| | | GIPIVEAKKILPNAVYLPMRKEVYQQVSSRIMNLLREYSEKIEIASIDEAYLDISDKVRD | |
| | | YREAYNLGLEIKNKILEKEKITVTVGISKNKVFAKIAADMAKPNGIKVIDDEEVKRLIRE | |
| | | LDIADVPGIGNITAEKLKKLGINKLVDTLSIEFDKLKGMIGEAKAKYLISLARDEYNEPI | |
| | | RTRVRKSIGRIVTMKRNSRNLEEIKPYLFRAIEESYYKLDKRIPKAIHVVAVTEDLDIVS | |
| | | RGRTFPHGISKETAYSESVKLLQKILEEDERKIRRIGVRFSKF | |
| 246 | Protein | MIVLFVDFDYFYAQVEEVLNPSLKGKPVVVCVFSGRFEDSGAVATANYEARKFGVKA | Dpo4-Δ12 S85C, |
| | | GIPIVEAKKILPNAVYLPMRKEVYQQVCSRIMNLLREYSEKIEIASIDEAYLDISDKVRD | |
| | | YREAYNLGLEIKNKILEKEKITVTVGISKNKVFAKIAADMAKPNGIKVIDDEEVKRLIRE | |
| | | LDIADVPGIGNITAEKLKKLGINKLVDTLSIEFDKLKGMIGEAKAKYLISLARDEYNEPI | |
| | | RTRVRKSIGRIVTMKRNSRNLEEIKPYLFRAIEESYYKLDKRIPKAIHVVAVTEDLDIVS | |
| | | RGRTFPHGISKETAYSESVKLLQKILEEDERKIRRIGVRFSKF | |
| 247 | Protein | MIVLFVDFDYFYAQVEEVLNPSLKGKPVVVCVFSGRFEDSGAVATANYEARKFGVKA | Dpo4-Δ12 S86C, |
| | | GIPIVEAKKILPNAVYLPMRKEVYQQVSCRIMNLLREYSEKIEIASIDEAYLDISDKVRD | |
| | | YREAYNLGLEIKNKILEKEKITVTVGISKNKVFAKIAADMAKPNGIKVIDDEEVKRLIRE | |
| | | LDIADVPGIGNITAEKLKKLGINKLVDTLSIEFDKLKGMIGEAKAKYLISLARDEYNEPI | |
| | | RTRVRKSIGRIVTMKRNSRNLEEIKPYLFRAIEESYYKLDKRIPKAIHVVAVTEDLDIVS | |
| | | RGRTFPHGISKETAYSESVKLLQKILEEDERKIRRIGVRFSKF | |
| 248 | Protein | MIVLFVDFDYFYAQVEEVLNPSLKGKPVVVCVFSGRFEDSGAVATANYEARKFGVKA | Dpo4-Δ12 S96C, |
| | | GIPIVEAKKILPNAVYLPMRKEVYQQVSSRIMNLLREYCEKIEIASIDEAYLDISDKVRD | |
| | | YREAYNLGLEIKNKILEKEKITVTVGISKNKVFAKIAADMAKPNGIKVIDDEEVKRLIRE | |
| | | LDIADVPGIGNITAEKLKKLGINKLVDTLSIEFDKLKGMIGEAKAKYLISLARDEYNEPI | |
| | | RTRVRKSIGRIVTMKRNSRNLEEIKPYLFRAIEESYYKLDKRIPKAIHVVAVTEDLDIVS | |
| | | RGRTFPHGISKETAYSESVKLLQKILEEDERKIRRIGVRFSKF | |
| 249 | Protein | MIVLFVDFDYFYAQVEEVLNPSLKGKPVVVCVFSGRFEDSGAVATANYEARKFGVKA | Dpo4-Δ12 A71C, |
| | | GIPIVEAKKILPNCVYLPMRKEVYQQVSSRIMNLLREYSEKIEIASIDEAYLDISDKVRD | |
| | | YREAYNLGLEIKNKILEKEKITVTVGISKNKVFAKIAADMAKPNGIKVIDDEEVKRLIRE | |
| | | LDIADVPGIGNITAEKLKKLGINKLVDTLSIEFDKLKGMIGEAKAKYLISLARDEYNEPI | |
| | | RTRVRKSIGRIVTMKRNSRNLEEIKPYLFRAIEESYYKLDKRIPKAIHVVAVTEDLDIVS | |
| | | RGRTFPHGISKETAYSESVKLLQKILEEDERKIRRIGVRFSKF | |
| 250 | Protein | MIVLFVDFDYFYAQVEEVLNPSLKGKPVVVCVFSGRFEDSGAVATANYEARKFGVKA | Dpo4-Δ12 M76G, |
| | | GIPIVEAKKILPNAVYLPGRKEVYQQVSSRIMNLLREYSEKIEIASIDEAYLDISDKVRDY | |
| | | REAYNLGLEIKNKILEKEKITVTVGISKNKVFAKIAADMAKPNGIKVIDDEEVKRLIREL | |
| | | DIADVPGIGNITAEKLKKLGINKLVDTLSIEFDKLKGMIGEAKAKYLISLARDEYNEPIR | |
| | | TRVRKSIGRIVTMKRNSRNLEEIKPYLFRAIEESYYKLDKRIPKAIHVVAVTEDLDIVSR | |
| | | GRTFPHGISKETAYSESVKLLQKILEEDERKIRRIGVRFSKF | |
| 251 | Protein | MIVLFVDFDYFYAQVEEVLNPSLKGKPVVVCVFSGRFEDSGAVATANYEARKFGVKA | Dpo4-Δ12 M76A, |
| | | GIPIVEAKKILPNAVYLPARKEVYQQVSSRIMNLLREYSEKIEIASIDEAYLDISDKVRDY | |
| | | REAYNLGLEIKNKILEKEKITVTVGISKNKVFAKIAADMAKPNGIKVIDDEEVKRLIREL | |
| | | DIADVPGIGNITAEKLKKLGINKLVDTLSIEFDKLKGMIGEAKAKYLISLARDEYNEPIR | |
| | | TRVRKSIGRIVTMKRNSRNLEEIKPYLFRAIEESYYKLDKRIPKAIHVVAVTEDLDIVSR | |
| | | GRTFPHGISKETAYSESVKLLQKILEEDERKIRRIGVRFSKF | |
| 252 | Protein | MIVLFVDFDYFYAQVEEVLNPSLKGKPVVVCVFSGRFEDSGAVATANYEARKFGVKA | Dpo4-Δ12 I67C, |
| | | GIPIVEAKKCLPNAVYLPMRKEVYQQVSSRIMNLLREYSEKIEIASIDEAYLDISDKVRD | |
| | | YREAYNLGLEIKNKILEKEKITVTVGISKNKVFAKIAADMAKPNGIKVIDDEEVKRLIRE | |
| | | LDIADVPGIGNITAEKLKKLGINKLVDTLSIEFDKLKGMIGEAKAKYLISLARDEYNEPI | |
| | | RTRVRKSIGRIVTMKRNSRNLEEIKPYLFRAIEESYYKLDKRIPKAIHVVAVTEDLDIVS | |
| | | RGRTFPHGISKETAYSESVKLLQKILEEDERKIRRIGVRFSKF | |
| 253 | Protein | MIVLFVDFDYFYAQVEEVLNPSLKGKPVVVCVFSGRFEDSGAVATANYEARKFGVKA | Dpo4-Δ12 S86G, |
| | | GIPIVEAKKILPNAVYLPMRKEVYQQVSGRIMNLLREYSEKIEIASIDEAYLDISDKVRD | |
| | | YREAYNLGLEIKNKILEKEKITVTVGISKNKVFAKIAADMAKPNGIKVIDDEEVKRLIRE | |
| | | LDIADVPGIGNITAEKLKKLGINKLVDTLSIEFDKLKGMIGEAKAKYLISLARDEYNEPI | |
| | | RTRVRKSIGRIVTMKRNSRNLEEIKPYLFRAIEESYYKLDKRIPKAIHVVAVTEDLDIVS | |
| | | RGRTFPHGISKETAYSESVKLLQKILEEDERKIRRIGVRFSKF | |
| 254 | Protein | MIVLFVDFDYFYAQVEEVLNPSLKGKPVVVCVFSGRFEDSGAVATANYEARKFGVKA | Dpo4-Δ12 |
| | | GIPIVEAKKILPNCVYLPMRKEVYQQVSSRIMNLLREYSEKIEIASIDEAYLDISDKVRD | A71C/A155C/V203C, |
| | | YREAYNLGLEIKNKILEKEKITVTVGISKNKVFAKIACDMAKPNGIKVIDDEEVKRLIRE | |
| | | LDIADVPGIGNITAEKLKKLGINKLCDTLSIEFDKLKGMIGEAKAKYLISLARDEYNEPI | |
| | | RTRVRKSIGRIVTMKRNSRNLEEIKPYLFRAIEESYYKLDKRIPKAIHVVAVTEDLDIVS | |
| | | RGRTFPHGISKETAYSESVKLLQKILEEDERKIRRIGVRFSKF | |
| 255 | Protein | MIVLFVDFDYFYAQVEEVLNPSLKGKPVVVCVFSGRFEDSGAVATANYEARKFGVKA | Dpo4-Δ12 |
| | | GIPIVEAKKILPNAVYLPMRKEVYQQVSCRIMNLLREYSEKIEIASIDEAYLDISDKVRD | S86C/A155C/V203C, |
| | | YREAYNLGLEIKNKILEKEKITVTVGISKNKVFAKIACDMAKPNGIKVIDDEEVKRLIRE | |
| | | LDIADVPGIGNITAEKLKKLGINKLCDTLSIEFDKLKGMIGEAKAKYLISLARDEYNEPI | |
| | | RTRVRKSIGRIVTMKRNSRNLEEIKPYLFRAIEESYYKLDKRIPKAIHVVAVTEDLDIVS | |
| | | RGRTFPHGISKETAYSESVKLLQKILEEDERKIRRIGVRFSKF | |
| 256 | Protein | MIVLFVDFDYFYAQVEEVLNPSLKGKPVVVSVFSGRFEDSGAVATANYEARKFGVKA | Dpo4-Δ12 |
| | | GIPIVEAKKILPNAVYLPMRKEVYQQVSSRIMNLLREYSEKIEIASIDEAYLDISDKVRD | C31S/A155C/V203C, |
| | | YREAYNLGLEIKNKILEKEKITVTVGISKNKVFAKIACDMAKPNGIKVIDDEEVKRLIRE | |
| | | LDIADVPGIGNITAEKLKKLGINKLCDTLSIEFDKLKGMIGEAKAKYLISLARDEYNEPI | |
| | | RTRVRKSIGRIVTMKRNSRNLEEIKPYLFRAIEESYYKLDKRIPKAIHVVAVTEDLDIVS | |
| | | RGRTFPHGISKETAYSESVKLLQKILEEDERKIRRIGVRFSKF | |
| 257 | Protein | MIVLFVDFDYFYAQVEEVLNPSLKGKPVVVCVFSGRFEDSGAVATANYEARKFGVKA | Dpo4-Δ12 |
| | | GIPIVEAKKILPNAVYLPGRKEVYQQVSSRIMNLLREYSEKIEIASIDEAYLDISDKVRDY | M76G/A155C/V203C, |
| | | REAYNLGLEIKNKILEKEKITVTVGISKNKVFAKIACDMAKPNGIKVIDDEEVKRLIREL | |
| | | DIADVPGIGNITAEKLKKLGINKLCDTLSIEFDKLKGMIGEAKAKYLISLARDEYNEPIR | |
| | | TRVRKSIGRIVTMKRNSRNLEEIKPYLFRAIEESYYKLDKRIPKAIHVVAVTEDLDIVSR | |
| | | GRTFPHGISKETAYSESVKLLQKILEEDERKIRRIGVRFSKF | |
| 258 | Protein | MIVLFVDFDYFYAQVEEVLNPSLKGKPVVVCVFSGRFEDSGAVATANYEARKFGVKA | DpO4-Δ12 |
| | | GIPIVEAKKILPNAVYLPARKEVYQQVSSRIMNLLREYSEKIEIASIDEAYLDISDKVRDY | M76A/A155C/V203C, |
| | | REAYNLGLEIKNKILEKEKITVTVGISKNKVFAKIACDMAKPNGIKVIDDEEVKRLIREL | |
| | | DIADVPGIGNITAEKLKKLGINKLCDTLSIEFDKLKGMIGEAKAKYLISLARDEYNEPIR | |
| | | TRVRKSIGRIVTMKRNSRNLEEIKPYLFRAIEESYYKLDKRIPKAIHVVAVTEDLDIVSR | |
| | | GRTFPHGISKETAYSESVKLLQKILEEDERKIRRIGVRFSKF | |
| 259 | Protein | MIVLFVDFDYFYAQVEEVLNPSLKGKPVVVCVFSGRFEDSGAVATANYEARKFGVKA | Dpo4-Δ12 |
| | | GIPIVEAKKCLPNAVYLPMRKEVYQQVSSRIMNLLREYSEKIEIASIDEAYLDISDKVRD | I67C/A155C/V203C, |
| | | YREAYNLGLEIKNKILEKEKITVTVGISKNKVFAKIACDMAKPNGIKVIDDEEVKRLIRE | |
| | | LDIADVPGIGNITAEKLKKLGINKLCDTLSIEFDKLKGMIGEAKAKYLISLARDEYNEPI | |
| | | RTRVRKSIGRIVTMKRNSRNLEEIKPYLFRAIEESYYKLDKRIPKAIHVVAVTEDLDIVS | |
| | | RGRTFPHGISKETAYSESVKLLQKILEEDERKIRRIGVRFSKF | |
| 260 | Protein | MIVLFVDFDYFYAQVEEVLNPSLKGKPVVVCVFSGRFEDSGAVATANYEARKFGVKA | Dpo4-Δ12 |
| | | GIPIVEAKKILPNAVYLPMRKEVYQQVSGRIMNLLREYSEKIEIASIDEAYLDISDKVRD | S86G/A155C/V203C, |
| | | YREAYNLGLEIKNKILEKEKITVTVGISKNKVFAKIACDMAKPNGIKVIDDEEVKRLIRE | |
| | | LDIADVPGIGNITAEKLKKLGINKLCDTLSIEFDKLKGMIGEAKAKYLISLARDEYNEPI | |
| | | RTRVRKSIGRIVTMKRNSRNLEEIKPYLFRAIEESYYKLDKRIPKAIHVVAVTEDLDIVS | |
| | | RGRTFPHGISKETAYSESVKLLQKILEEDERKIRRIGVRFSKF | |
| 261 | Protein | MIVLFVDFDYFYAQVEEVLNPSLKGKPVVVCVFSGRFEDSGAVATANYEARKFGVKA | Dpo4-Δ12 |
| | | GIPIVEAKKILPNAVYLPMRKEVYQQVSSRIMNLLREYGEKIEIASIDEAYLDISDKVRD | S96G/A155C/V203C, |
| | | YREAYNLGLEIKNKILEKEKITVTVGISKNKVFAKIACDMAKPNGIKVIDDEEVKRLIRE | |
| | | LDIADVPGIGNITAEKLKKLGINKLCDTLSIEFDKLKGMIGEAKAKYLISLARDEYNEPI | |
| | | RTRVRKSIGRIVTMKRNSRNLEEIKPYLFRAIEESYYKLDKRIPKAIHVVAVTEDLDIVS | |
| | | RGRTFPHGISKETAYSESVKLLQKILEEDERKIRRIGVRFSKF | |
| 262 | Protein | MIVLFVDFDYFYAQVEEVLNPSLKGKPVVVCVFSGRFEDSGAVATANYEARKFGVKA | Dpo4-Δ12 |
| | | GIPIVEAKKILPNCVYLPMRKEVYQQVSSRIMNLLREYSEKIEIASIDEAYLDISDKVRD | A71C/A155C, |
| | | YREAYNLGLEIKNKILEKEKITVTVGISKNKVFAKIACDMAKPNGIKVIDDEEVKRLIRE | |
| | | LDIADVPGIGNITAEKLKKLGINKLVDTLSIEFDKLKGMIGEAKAKYLISLARDEYNEPI | |
| | | RTRVRKSIGRIVTMKRNSRNLEEIKPYLFRAIEESYYKLDKRIPKAIHVVAVTEDLDIVS | |
| | | RGRTFPHGISKETAYSESVKLLQKILEEDERKIRRIGVRFSKF | |
| 263 | Protein | MIVLFVDFDYFYAQVEEVLNPSLKGKPVVVCVFSGRFEDSGAVATANYEARKFGVKA | Dpo4-Δ12 |
| | | GIPIVEAKKILPNAVYLPMRKEVYQQVSCRIMNLLREYSEKIEIASIDEAYLDISDKVRD | S86C/A155C/,, |
| | | YREAYNLGLEIKNKILEKEKITVTVGISKNKVFAKIACDMAKPNGIKVIDDEEVKRLIRE | |
| | | LDIADVPGIGNITAEKLKKLGINKLVDTLSIEFDKLKGMIGEAKAKYLISLARDEYNEPI | |
| | | RTRVRKSIGRIVTMKRNSRNLEEIKPYLFRAIEESYYKLDKRIPKAIHVVAVTEDLDIVS | |
| | | RGRTFPHGISKETAYSESVKLLQKILEEDERKIRRIGVRFSKF | |
| 264 | Protein | MIVLFVDFDYFYAQVEEVLNPSLKGKPVVVSVFSGRFEDSGAVATANYEARKFGVKA | Dpo4-Δ12 |
| | | GIPIVEAKKILPNAVYLPMRKEVYQQVSSRIMNLLREYSEKIEIASIDEAYLDISDKVRD | C31S/A155C, |
| | | YREAYNLGLEIKNKILEKEKITVTVGISKNKVFAKIACDMAKPNGIKVIDDEEVKRLIRE | |
| | | LDIADVPGIGNITAEKLKKLGINKLVDTLSIEFDKLKGMIGEAKAKYLISLARDEYNEPI | |
| | | RTRVRKSIGRIVTMKRNSRNLEEIKPYLFRAIEESYYKLDKRIPKAIHVVAVTEDLDIVS | |
| | | RGRTFPHGISKETAYSESVKLLQKILEEDERKIRRIGVRFSKF | |
| 265 | Protein | MIVLFVDFDYFYAQVEEVLNPSLKGKPVVVCVFSGRFEDSGAVATANYEARKFGVKA | Dpo4-Δ12 |
| | | GIPIVEAKKILPNAVYLPGRKEVYQQVSSRIMNLLREYSEKIEIASIDEAYLDISDKVRDY | M76G/A155C, |
| | | REAYNLGLEIKNKILEKEKITVTVGISKNKVFAKIACDMAKPNGIKVIDDEEVKRLIREL | |
| | | DIADVPGIGNITAEKLKKLGINKLVDTLSIEFDKLKGMIGEAKAKYLISLARDEYNEPIR | |
| | | TRVRKSIGRIVTMKRNSRNLEEIKPYLFRAIEESYYKLDKRIPKAIHVVAVTEDLDIVSR | |
| | | GRTFPHGISKETAYSESVKLLQKILEEDERKIRRIGVRFSKF | |
| 266 | Protein | MIVLFVDFDYFYAQVEEVLNPSLKGKPVVVCVFSGRFEDSGAVATANYEARKFGVKA | Dpo4-Δ12 |
| | | GIPIVEAKKILPNAVYLPARKEVYQQVSSRIMNLLREYSEKIEIASIDEAYLDISDKVRDY | M76A/A155C, |
| | | REAYNLGLEIKNKILEKEKITVTVGISKNKVFAKIACDMAKPNGIKVIDDEEVKRLIREL | |
| | | DIADVPGIGNITAEKLKKLGINKLVDTLSIEFDKLKGMIGEAKAKYLISLARDEYNEPIR | |
| | | TRVRKSIGRIVTMKRNSRNLEEIKPYLFRAIEESYYKLDKRIPKAIHVVAVTEDLDIVSR | |
| | | GRTFPHGISKETAYSESVKLLQKILEEDERKIRRIGVRFSKF | |
| 267 | Protein | MIVLFVDFDYFYAQVEEVLNPSLKGKPVVVCVFSGRFEDSGAVATANYEARKFGVKA | Dpo4-Δ12 |
| | | GIPIVEAKKCLPNAVYLPMRKEVYQQVSSRIMNLLREYSEKIEIASIDEAYLDISDKVRD | I67C/A155C, |
| | | YREAYNLGLEIKNKILEKEKITVTVGISKNKVFAKIACDMAKPNGIKVIDDEEVKRLIRE | |
| | | LDIADVPGIGNITAEKLKKLGINKLVDTLSIEFDKLKGMIGEAKAKYLISLARDEYNEPI | |
| | | RTRVRKSIGRIVTMKRNSRNLEEIKPYLFRAIEESYYKLDKRIPKAIHVVAVTEDLDIVS | |
| | | RGRTFPHGISKETAYSESVKLLQKILEEDERKIRRIGVRFSKF | |
| 268 | Protein | MIVLFVDFDYFYAQVEEVLNPSLKGKPVVVCVFSGRFEDSGAVATANYEARKFGVKA | Dpo4-Δ12 |
| | | GIPIVEAKKILPNAVYLPMRKEVYQQVSGRIMNLLREYSEKIEIASIDEAYLDISDKVRD | S86G/A155C, |
| | | YREAYNLGLEIKNKILEKEKITVTVGISKNKVFAKIACDMAKPNGIKVIDDEEVKRLIRE | |
| | | LDIADVPGIGNITAEKLKKLGINKLVDTLSIEFDKLKGMIGEAKAKYLISLARDEYNEPI | |
| | | RTRVRKSIGRIVTMKRNSRNLEEIKPYLFRAIEESYYKLDKRIPKAIHVVAVTEDLDIVS | |
| | | RGRTFPHGISKETAYSESVKLLQKILEEDERKIRRIGVRFSKF | |
| 269 | Protein | MIVLFVDFDYFYAQVEEVLNPSLKGKPVVVCVFSGRFEDSGAVATANYEARKFGVKA | Dpo4-Δ12 |
| | | GIPIVEAKKILPNAVYLPMRKEVYQQVSSRIMNLLREYGEKIEIASIDEAYLDISDKVRD | S96G/A155C, |
| | | YREAYNLGLEIKNKILEKEKITVTVGISKNKVFAKIACDMAKPNGIKVIDDEEVKRLIRE | |
| | | LDIADVPGIGNITAEKLKKLGINKLVDTLSIEFDKLKGMIGEAKAKYLISLARDEYNEPI | |
| | | RTRVRKSIGRIVTMKRNSRNLEEIKPYLFRAIEESYYKLDKRIPKAIHVVAVTEDLDIVS | |
| | | RGRTFPHGISKETAYSESVKLLQKILEEDERKIRRIGVRFSKF | |
| 270 | Protein | MIVLFVDFDYFYAQVEEVLNPSLKGKPVVVCVFSGRFEDSGAVATANYEARKFGVKA | Dpo4-Δ12 |
| | | GIPIVEAKKILPNCVYLPMRKEVYQQVSSRIMNLLREYSEKIEIASIDEAYLDISDKVRD | A71C/V203C, |
| | | YREAYNLGLEIKNKILEKEKITVTVGISKNKVFAKIAADMAKPNGIKVIDDEEVKRLIRE | |
| | | LDIADVPGIGNITAEKLKKLGINKLCDTLSIEFDKLKGMIGEAKAKYLISLARDEYNEPI | |
| | | RTRVRKSIGRIVTMKRNSRNLEEIKPYLFRAIEESYYKLDKRIPKAIHVVAVTEDLDIVS | |
| | | RGRTFPHGISKETAYSESVKLLQKILEEDERKIRRIGVRFSKF | |
| 271 | Protein | MIVLFVDFDYFYAQVEEVLNPSLKGKPVVVCVFSGRFEDSGAVATANYEARKFGVKA | Dpo4-Δ12 |
| | | GIPIVEAKKILPNAVYLPMRKEVYQQVSCRIMNLLREYSEKIEIASIDEAYLDISDKVRD | S86C/V203C, |
| | | YREAYNLGLEIKNKILEKEKITVTVGISKNKVFAKIAADMAKPNGIKVIDDEEVKRLIRE | |
| | | LDIADVPGIGNITAEKLKKLGINKLCDTLSIEFDKLKGMIGEAKAKYLISLARDEYNEPI | |
| | | RTRVRKSIGRIVTMKRNSRNLEEIKPYLFRAIEESYYKLDKRIPKAIHVVAVTEDLDIVS | |
| | | RGRTFPHGISKETAYSESVKLLQKILEEDERKIRRIGVRFSKF | |
| 272 | Protein | MIVLFVDFDYFYAQVEEVLNPSLKGKPVVVSVFSGRFEDSGAVATANYEARKFGVKA | Dpo4-Δ12 |
| | | GIPIVEAKKILPNAVYLPMRKEVYQQVSSRIMNLLREYSEKIEIASIDEAYLDISDKVRD | C31S/V203C, |
| | | YREAYNLGLEIKNKILEKEKITVTVGISKNKVFAKIAADMAKPNGIKVIDDEEVKRLIRE | |
| | | LDIADVPGIGNITAEKLKKLGINKLCDTLSIEFDKLKGMIGEAKAKYLISLARDEYNEPI | |
| | | RTRVRKSIGRIVTMKRNSRNLEEIKPYLFRAIEESYYKLDKRIPKAIHVVAVTEDLDIVS | |
| | | RGRTFPHGISKETAYSESVKLLQKILEEDERKIRRIGVRFSKF | |
| 273 | Protein | MIVLFVDFDYFYAQVEEVLNPSLKGKPVVVCVFSGRFEDSGAVATANYEARKFGVKA | Dpo4-Δ12 |
| | | GIPIVEAKKILPNAVYLPGRKEVYQQVSSRIMNLLREYSEKIEIASIDEAYLDISDKVRDY | M76G/V203C, |
| | | REAYNLGLEIKNKILEKEKITVTVGISKNKVFAKIAADMAKPNGIKVIDDEEVKRLIREL | |
| | | DIADVPGIGNITAEKLKKLGINKLCDTLSIEFDKLKGMIGEAKAKYLISLARDEYNEPIR | |
| | | TRVRKSIGRIVTMKRNSRNLEEIKPYLFRAIEESYYKLDKRIPKAIHVVAVTEDLDIVSR | |
| | | GRTFPHGISKETAYSESVKLLQKILEEDERKIRRIGVRFSKF | |
| 274 | Protein | MIVLFVDFDYFYAQVEEVLNPSLKGKPVVVCVFSGRFEDSGAVATANYEARKFGVKA | Dpo4-Δ12 |
| | | GIPIVEAKKILPNAVYLPARKEVYQQVSSRIMNLLREYSEKIEIASIDEAYLDISDKVRDY | M76A/V203C, |
| | | REAYNLGLEIKNKILEKEKITVTVGISKNKVFAKIAADMAKPNGIKVIDDEEVKRLIREL | |
| | | DIADVPGIGNITAEKLKKLGINKLCDTLSIEFDKLKGMIGEAKAKYLISLARDEYNEPIR | |
| | | TRVRKSIGRIVTMKRNSRNLEEIKPYLFRAIEESYYKLDKRIPKAIHVVAVTEDLDIVSR | |
| | | GRTFPHGISKETAYSESVKLLQKILEEDERKIRRIGVRFSKF | |
| 275 | Protein | MIVLFVDFDYFYAQVEEVLNPSLKGKPVVVCVFSGRFEDSGAVATANYEARKFGVKA | Dpo4-Δ12 |
| | | GIPIVEAKKCLPNAVYLPMRKEVYQQVSSRIMNLLREYSEKIEIASIDEAYLDISDKVRD | I67C/V203C, |
| | | YREAYNLGLEIKNKILEKEKITVTVGISKNKVFAKIAADMAKPNGIKVIDDEEVKRLIRE | |
| | | LDIADVPGIGNITAEKLKKLGINKLCDTLSIEFDKLKGMIGEAKAKYLISLARDEYNEPI | |
| | | RTRVRKSIGRIVTMKRNSRNLEEIKPYLFRAIEESYYKLDKRIPKAIHVVAVTEDLDIVS | |
| | | RGRTFPHGISKETAYSESVKLLQKILEEDERKIRRIGVRFSKF | |
| 276 | Protein | MIVLFVDFDYFYAQVEEVLNPSLKGKPVVVCVFSGRFEDSGAVATANYEARKFGVKA | Dpo4-Δ12 |
| | | GIPIVEAKKILPNAVYLPMRKEVYQQVSGRIMNLLREYSEKIEIASIDEAYLDISDKVRD | S86G/V203C, |
| | | YREAYNLGLEIKNKILEKEKITVTVGISKNKVFAKIAADMAKPNGIKVIDDEEVKRLIRE | |
| | | LDIADVPGIGNITAEKLKKLGINKLCDTLSIEFDKLKGMIGEAKAKYLISLARDEYNEPI | |
| | | RTRVRKSIGRIVTMKRNSRNLEEIKPYLFRAIEESYYKLDKRIPKAIHVVAVTEDLDIVS | |
| | | RGRTFPHGISKETAYSESVKLLQKILEEDERKIRRIGVRFSKF | |
| 277 | Protein | MIVLFVDFDYFYAQVEEVLNPSLKGKPVVVCVFSGRFEDSGAVATANYEARKFGVKA | Dpo4-Δ12 |
| | | GIPIVEAKKILPNAVYLPMRKEVYQQVSSRIMNLLREYGEKIEIASIDEAYLDISDKVRD | S96G/V203C, |
| | | YREAYNLGLEIKNKILEKEKITVTVGISKNKVFAKIAADMAKPNGIKVIDDEEVKRLIRE | |
| | | LDIADVPGIGNITAEKLKKLGINKLCDTLSIEFDKLKGMIGEAKAKYLISLARDEYNEPI | |
| | | RTRVRKSIGRIVTMKRNSRNLEEIKPYLFRAIEESYYKLDKRIPKAIHVVAVTEDLDIVS | |
| | | RGRTFPHGISKETAYSESVKLLQKILEEDERKIRRIGVRFSKF | |
| 278 | Protein | MIVLFVDFDYFYAQVEEVLNPSLKGKPVVVSVFSGRFEDSGAVATANYEARKFGVKA | Dpo4-Δ12 |
| | | GIPIVEAKKILPNAVYLPMRKEVYQQVSSRIMNLLREYSEKIEIASIDEAYLDISDKVRD | C31S/A155C, |
| | | YREAYNLGLEIKNKILEKEKITVTVGISKNKVFAKIACDMAKPNGIKVIDDEEVKRLIRE | |
| | | LDIADVPGIGNITAEKLKKLGINKLVDTLSIEFDKLKGMIGEAKAKYLISLARDEYNEPI | |
| | | RTRVRKSIGRIVTMKRNSRNLEEIKPYLFRAIEESYYKLDKRIPKAIHVVAVTEDLDIVS | |
| | | RGRTFPHGISKETAYSESVKLLQKILEEDERKIRRIGVRFSKF | |
| 279 | Protein | MIVLFVDFDYFYAQVEEVLNPSLKGKPVVVSVFSGRFEDSGAVATANYEARKFGVKA | Dpo4-Δ12 |
| | | GIPIVEAKKILPNAVYLPMRKEVYQQVSSRIMNLLREYSEKIEIASIDEAYLDISDKVRD | C31S/V203C, |
| | | YREAYNLGLEIKNKILEKEKITVTVGISKNKVFAKIAADMAKPNGIKVIDDEEVKRLIRE | |
| | | LDIADVPGIGNITAEKLKKLGINKLCDTLSIEFDKLKGMIGEAKAKYLISLARDEYNEPI | |
| | | RTRVRKSIGRIVTMKRNSRNLEEIKPYLFRAIEESYYKLDKRIPKAIHVVAVTEDLDIVS | |
| | | RGRTFPHGISKETAYSESVKLLQKILEEDERKIRRIGVRFSKF | |
| 280 | Protein | MIVLFVDFDYFYAQVEEVLNPSLKGKPVVVSVFSGRFEDSGAVATANYEARKFGVKA | Dpo4-Δ12 |
| | | GIPIVEAKKILPNAVYLPMRKEVYQQVSSRIMNLLREYSEKIEIASIDEAYLDISDKVRD | C31S/A155C/V203C, |
| | | YREAYNLGLEIKNKILEKEKITVTVGISKNKVFAKIACDMAKPNGIKVIDDEEVKRLIRE | |
| | | LDIADVPGIGNITAEKLKKLGINKLCDTLSIEFDKLKGMIGEAKAKYLISLARDEYNEPI | |
| | | RTRVRKSIGRIVTMKRNSRNLEEIKPYLFRAIEESYYKLDKRIPKAIHVVAVTEDLDIVS | |
| | | RGRTFPHGISKETAYSESVKLLQKILEEDERKIRRIGVRFSKF | |
| 281 | Protein | MIVLFVDFDYFYAQVEEVLNPSLKGKPVVVCVFSGRFEDSGAVATANYEARKFGVKA | Dpo4-Δ15, |
| | | GIPIVEAKIULPNAVYLPMRKEVYQQVSSRIMNLLREYSEKIEIASIDEAYLDISDKVRD | |
| | | YREAYNLGLEIKNKILEKEKITVTVGISKNKVFAKIAADMAKPNGIKVIDDEEVKRLIRE | |
| | | LDIADVPGIGNITAEKLKKLGINKLVDTLSIEFDKLKGMIGEAKAKYLISLARDEYNEPI | |
| | | RTRVRKSIGRIVTMKRNSRNLEEIKPYLFRAIEESYYKLDKRIPKAIHVVAVTEDLDIVS | |
| | | RGRTFPHGISKETAYSESVKLLQKILEEDERKIRRIGVRF | |
| 282 | Protein | MIVLFVDFDYFYAQVEEVLNPSLKGKPVVVCVFSGRFEDSGAVATANYEARKFGVKA | Dpo4-Δ15 A155C, |
| | | GIPIVEAKKILPNAVYLPMRKEVYQQVSSRIMNLLREYSEKIEIASIDEAYLDISDKVRD | |
| | | YREAYNLGLEIKNKILEKEKITVTVGISKNKVFAKIACDMAKPNGIKVIDDEEVKRLIRE | |
| | | LDIADVPGIGNITAEKLKKLGINKLVDTLSIEFDKLKGMIGEAKAKYLISLARDEYNEPI | |
| | | RTRVRKSIGRIVTMKRNSRNLEEIKPYLFRAIEESYYKLDKRIPKAIHVVAVTEDLDIVS | |
| | | RGRTFPHGISKETAYSESVKLLQKILEEDERKIRRIGVRF | |
| 283 | Protein | MIVLFVDFDYFYAQVEEVLNPSLKGKPVVVCVFSGRFEDSGAVATANYEARKFGVKA | Dpo4-Δ15 V203C, |
| | | GIPIVEAKKILPNAVYLPMRKEVYQQVSSRIMNLLREYSEKIEIASIDEAYLDISDKVRD | |
| | | YREAYNLGLEIKNKILEKEKITVTVGISKNKVFAKIAADMAKPNGIKVIDDEEVKRLIRE | |
| | | LDIADVPGIGNITAEKLKKLGINKLCDTLSIEFDKLKGMIGEAKAKYLISLARDEYNEPI | |
| | | RTRVRKSIGRIVTMKRNSRNLEEIKPYLFRAIEESYYKLDKRIPKAIHVVAVTEDLDIVS | |
| | | RGRTFPHGISKETAYSESVKLLQKILEEDERKIRRIGVRF | |
| 284 | Protein | MIVLFVDFDYFYAQVEEVLNPSLKGKPVVVCVFSGRFEDSGAVATANYEARKFGVKA | Dpo4-Δ15 |
| | | GIPIVEAKKILPNAVYLPMRKEVYQQVSSRIMNLLREYSEKIEIASIDEAYLDISDKVRD | A155C/V203C, |
| | | YREAYNLGLEIKNKILEKEKITVTVGISKNKVFAKIACDMAKPNGIKVIDDEEVKRLIRE | |
| | | LDIADVPGIGNITAEKLKKLGINKLCDTLSIEFDKLKGMIGEAKAKYLISLARDEYNEPI | |
| | | RTRVRKSIGRIVTMKRNSRNLEEIKPYLFRAIEESYYKLDKRIPKAIHVVAVTEDLDIVS | |
| | | RGRTFPHGISKETAYSESVKLLQKILEEDERKIRRIGVRF | |
| 285 | Protein | MIVLFVDFDYFYAQVEEVLNPSLKGKPVVVSVFSGRFEDSGAVATANYEARKFGVKA | Dpo4-Δ15 C31S, |
| | | GIPIVEAKKILPNAVYLPMRKEVYQQVSSRIMNLLREYSEKIEIASIDEAYLDISDKVRD | |
| | | YREAYNLGLEIKNKILEKEKITVTVGISKNKVFAKIAADMAKPNGIKVIDDEEVKRLIRE | |
| | | LDIADVPGIGNITAEKLKKLGINKLVDTLSIEFDKLKGMIGEAKAKYLISLARDEYNEPI | |
| | | RTRVRKSIGRIVTMKRNSRNLEEIKPYLFRAIEESYYKLDKRIPKAIHVVAVTEDLDIVS | |
| | | RGRTFPHGISKETAYSESVKLLQKILEEDERKIRRIGVRF | |
| 286 | Protein | MIVLFVDFDYFYAQVEEVLNPSLKGKPVVVCVFSGRFEDSGAVATANYEARKFGVKA | Dpo4-Δ15 S85C, |
| | | GIPIVEAKKILPNAVYLPMRKEVYQQVCSRIMNLLREYSEKIEIASIDEAYLDISDKVRD | |
| | | YREAYNLGLEIKNKILEKEKITVTVGISKNKVFAKIAADMAKPNGIKVIDDEEVKRLIRE | |
| | | LDIADVPGIGNITAEKLKKLGINKLVDTLSIEFDKLKGMIGEAKAKYLISLARDEYNEPI | |
| | | RTRVRKSIGRIVTMKRNSRNLEEIKPYLFRAIEESYYKLDKRIPKAIHVVAVTEDLDIVS | |
| | | RGRTFPHGISKETAYSESVKLLQKILEEDERKIRRIGVRF | |
| 287 | Protein | MIVLFVDFDYFYAQVEEVLNPSLKGKPVVVCVFSGRFEDSGAVATANYEARKFGVKA | Dpo4-Δ15 S86C, |
| | | GIPIVEAKKILPNAVYLPMRKEVYQQVSCRIMNLLREYSEKIEIASIDEAYLDISDKVRD | |
| | | YREAYNLGLEIKNKILEKEKITVTVGISKNKVFAKIAADMAKPNGIKVIDDEEVKRLIRE | |
| | | LDIADVPGIGNITAEKLKKLGINKLVDTLSIEFDKLKGMIGEAKAKYLISLARDEYNEPI | |
| | | RTRVRKSIGRIVTMKRNSRNLEEIKPYLFRAIEESYYKLDKRIPKAIHVVAVTEDLDIVS | |
| | | RGRTFPHGISKETAYSESVKLLQKILEEDERKIRRIGVRF | |
| 288 | Protein | MIVLFVDFDYFYAQVEEVLNPSLKGKPVVVCVFSGRFEDSGAVATANYEARKFGVKA | Dpo4-Δ15 S96C, |
| | | GIPIVEAKKILPNAVYLPMRKEVYQQVSSRIMNLLREYCEKIEIASIDEAYLDISDKVRD | |
| | | YREAYNLGLEIKNKILEKEKITVTVGISKNKVFAKIAADMAKPNGIKVIDDEEVKRLIRE | |
| | | LDIADVPGIGNITAEKLKKLGINKLVDTLSIEFDKLKGMIGEAKAKYLISLARDEYNEPI | |
| | | RTRVRKSIGRIVTMKRNSRNLEEIKPYLFRAIEESYYKLDKRIPKAIHVVAVTEDLDIVS | |
| | | RGRTFPHGISKETAYSESVKLLQKILEEDERKIRRIGVRF | |
| 289 | Protein | MIVLFVDFDYFYAQVEEVLNPSLKGKPVVVCVFSGRFEDSGAVATANYEARKFGVKA | Dpo4-Δ15 A71C, |
| | | GIPIVEAKKILPNCVYLPMRKEVYQQVSSRIMNLLREYSEKIEIASIDEAYLDISDKVRD | |
| | | YREAYNLGLEIKNKILEKEKITVTVGISKNKVFAKIAADMAKPNGIKVIDDEEVKRLIRE | |
| | | LDIADVPGIGNITAEKLKKLGINKLVDTLSIEFDKLKGMIGEAKAKYLISLARDEYNEPI | |
| | | RTRVRKSIGRIVTMKRNSRNLEEIKPYLFRAIEESYYKLDKRIPKAIHVVAVTEDLDIVS | |
| | | RGRTFPHGISKETAYSESVKLLQKILEEDERKIRRIGVRF | |
| 290 | Protein | MIVLFVDFDYFYAQVEEVLNPSLKGKPVVVCVFSGRFEDSGAVATANYEARKFGVKA | Dpo4-Δ15 M76G, |
| | | GIPIVEAKKILPNAVYLPGRKEVYQQVSSRIMNLLREYSEKIEIASIDEAYLDISDKVRDY | |
| | | REAYNLGLEIKNKILEKEKITVTVGISKNKVFAKIAADMAKPNGIKVIDDEEVKRLIREL | |
| | | DIADVPGIGNITAEKLKKLGINKLVDTLSIEFDKLKGMIGEAKAKYLISLARDEYNEPIR | |
| | | TRVRKSIGRIVTMKRNSRNLEEIKPYLFRAIEESYYKLDKRIPKAIHVVAVTEDLDIVSR | |
| | | GRTFPHGISKETAYSESVKLLQKILEEDERKIRRIGVRF | |
| 291 | Protein | MIVLFVDFDYFYAQVEEVLNPSLKGKPVVVCVFSGRFEDSGAVATANYEARKFGVKA | Dpo4-Δ15 M76A, |
| | | GIPIVEAKKILPNAVYLPARKEVYQQVSSRIMNLLREYSEKIEIASIDEAYLDISDKVRDY | |
| | | REAYNLGLEIKNKILEKEKITVTVGISKNKVFAKIAADMAKPNGIKVIDDEEVKRLIREL | |
| | | DIADVPGIGNITAEKLKKLGINKLVDTLSIEFDKLKGMIGEAKAKYLISLARDEYNEPIR | |
| | | TRVRKSIGRIVTMKRNSRNLEEIKPYLFRAIEESYYKLDKRIPKAIHVVAVTEDLDIVSR | |
| | | GRTFPHGISKETAYSESVKLLQKILEEDERKIRRIGVRF | |
| 292 | Protein | MIVLFVDFDYFYAQVEEVLNPSLKGKPVVVCVFSGRFEDSGAVATANYEARKFGVKA | Dpo4-Δ15 I67C, |
| | | GIPIVEAKKCLPNAVYLPMRKEVYQQVSSRIMNLLREYSEKIEIASIDEAYLDISDKVRD | |
| | | YREAYNLGLEIKNKILEKEKITVTVGISKNKVFAKIAADMAKPNGIKVIDDEEVKRLIRE | |
| | | LDIADVPGIGNITAEKLKKLGINKLVDTLSIEFDKLKGMIGEAKAKYLISLARDEYNEPI | |
| | | RTRVRKSIGRIVTMKRNSRNLEEIKPYLFRAIEESYYKLDKRIPKAIHVVAVTEDLDIVS | |
| | | RGRTFPHGISKETAYSESVKLLQKILEEDERKIRRIGVRF | |
| 293 | Protein | MIVLFVDFDYFYAQVEEVLNPSLKGKPVVVCVFSGRFEDSGAVATANYEARKFGVKA | Dpo4-Δ15 S86G, |
| | | GIPIVEAKKILPNAVYLPMRKEVYQQVSGRIMNLLREYSEKIEIASIDEAYLDISDKVRD | |
| | | YREAYNLGLEIKNKILEKEKITVTVGISKNKVFAKIAADMAKPNGIKVIDDEEVKRLIRE | |
| | | LDIADVPGIGNITAEKLKKLGINKLVDTLSIEFDKLKGMIGEAKAKYLISLARDEYNEPI | |
| | | RTRVRKSIGRIVTMKRNSRNLEEIKPYLFRAIEESYYKLDKRIPKAIHVVAVTEDLDIVS | |
| | | RGRTFPHGISKETAYSESVKLLQKILEEDERKIRRIGVRF | |
| 294 | Protein | MIVLFVDFDYFYAQVEEVLNPSLKGKPVVVCVFSGRFEDSGAVATANYEARKFGVKA | Dpo4-Δ15 |
| | | GIPIVEAKKILPNCVYLPMRKEVYQQVSSRIMNLLREYSEKIEIASIDEAYLDISDKVRD | A71C/A155C/V203C, |
| | | YREAYNLGLEIKNKILEKEKITVTVGISKNKVFAKIACDMAKPNGIKVIDDEEVKRLIRE | |
| | | LDIADVPGIGNITAEKLKKLGINKLCDTLSIEFDKLKGMIGEAKAKYLISLARDEYNEPI | |
| | | RTRVRKSIGRIVTMKRNSRNLEEIKPYLFRAIEESYYKLDKRIPKAIHVVAVTEDLDIVS | |
| | | RGRTFPHGISKETAYSESVKLLQKILEEDERKIRRIGVRF | |
| 295 | Protein | MIVLFVDFDYFYAQVEEVLNPSLKGKPVVVCVFSGRFEDSGAVATANYEARKFGVKA | Dpo4-Δ15 |
| | | GIPIVEAKKILPNAVYLPMRKEVYQQVSCRIMNLLREYSEKIEIASIDEAYLDISDKVRD | S86C/A155C/V203C, |
| | | YREAYNLGLEIKNKILEKEKITVTVGISKNKVFAKIACDMAKPNGIKVIDDEEVKRLIRE | |
| | | LDIADVPGIGNITAEKLKKLGINKLCDTLSIEFDKLKGMIGEAKAKYLISLARDEYNEPI | |
| | | RTRVRKSIGRIVTMKRNSRNLEEIKPYLFRAIEESYYKLDKRIPKAIHVVAVTEDLDIVS | |
| | | RGRTFPHGISKETAYSESVKLLQKILEEDERKIRRIGVRF | |
| 296 | Protein | MIVLFVDFDYFYAQVEEVLNPSLKGKPVVVSVFSGRFEDSGAVATANYEARKFGVKA | Dpo4-Δ15 |
| | | GIPIVEAKKILPNAVYLPMRKEVYQQVSSRIMNLLREYSEKIEIASIDEAYLDISDKVRD | C31S/A155C/V203C, |
| | | YREAYNLGLEIKNKILEKEKITVTVGISKNKVFAKIACDMAKPNGIKVIDDEEVKRLIRE | |
| | | LDIADVPGIGNITAEKLKKLGINKLCDTLSIEFDKLKGMIGEAKAKYLISLARDEYNEPI | |
| | | RTRVRKSIGRIVTMKRNSRNLEEIKPYLFRAIEESYYKLDKRIPKAIHVVAVTEDLDIVS | |
| | | RGRTFPHGISKETAYSESVKLLQKILEEDERKIRRIGVRF | |
| 297 | Protein | MIVLFVDFDYFYAQVEEVLNPSLKGKPVVVCVFSGRFEDSGAVATANYEARKFGVKA | Dpo4-Δ15 |
| | | GIPIVEAKKILPNAVYLPGRKEVYQQVSSRIMNLLREYSEKIEIASIDEAYLDISDKVRDY | M76G/A155C/V203C, |
| | | REAYNLGLEIKNKILEKEKITVTVGISKNKVFAKIACDMAKPNGIKVIDDEEVKRLIREL | |
| | | DIADVPGIGNITAEKLKKLGINKLCDTLSIEFDKLKGMIGEAKAKYLISLARDEYNEPIR | |
| | | TRVRKSIGRIVTMKRNSRNLEEIKPYLFRAIEESYYKLDKRIPKAIHVVAVTEDLDIVSR | |
| | | GRTFPHGISKETAYSESVKLLQKILEEDERKIRRIGVRF | |
| 298 | Protein | MIVLFVDFDYFYAQVEEVLNPSLKGKPVVVCVFSGRFEDSGAVATANYEARKFGVKA | Dpo4-Δ15 |
| | | GIPIVEAKKILPNAVYLPARKEVYQQVSSRIMNLLREYSEKIEIASIDEAYLDISDKVRDY | M76A/A155C/V203C, |
| | | REAYNLGLEIKNKILEKEKITVTVGISKNKVFAKIACDMAKPNGIKVIDDEEVKRLIREL | |
| | | DIADVPGIGNITAEKLKKLGINKLCDTLSIEFDKLKGMIGEAKAKYLISLARDEYNEPIR | |
| | | TRVRKSIGRIVTMKRNSRNLEEIKPYLFRAIEESYYKLDKRIPKAIHVVAVTEDLDIVSR | |
| | | GRTFPHGISKETAYSESVKLLQKILEEDERKIRRIGVRF | |
| 299 | Protein | MIVLFVDFDYFYAQVEEVLNPSLKGKPVVVCVFSGRFEDSGAVATANYEARKFGVKA | Dpo4-Δ15 |
| | | GIPIVEAKKCLPNAVYLPMRKEVYQQVSSRIMNLLREYSEKIEIASIDEAYLDISDKVRD | 167C/A155C/V203C, |
| | | YREAYNLGLEIKNKILEKEKITVTVGISKNKVFAKIACDMAKPNGIKVIDDEEVKRLIRE | |
| | | LDIADVPGIGNITAEKLKKLGINKLCDTLSIEFDKLKGMIGEAKAKYLISLARDEYNEPI | |
| | | RTRVRKSIGRIVTMKRNSRNLEEIKPYLFRAIEESYYKLDKRIPKAIHVVAVTEDLDIVS | |
| | | RGRTFPHGISKETAYSESVKLLQKILEEDERKIRRIGVRF | |
| 300 | Protein | MIVLFVDFDYFYAQVEEVLNPSLKGKPVVVCVFSGRFEDSGAVATANYEARKFGVKA | Dpo4-Δ15 |
| | | GIPIVEAKKILPNAVYLPMRKEVYQQVSGRIMNLLREYSEKIEIASIDEAYLDISDKVRD | S86G/A155C/V203C, |
| | | YREAYNLGLEIKNKILEKEKITVTVGISKNKVFAKIACDMAKPNGIKVIDDEEVKRLIRE | |
| | | LDIADVPGIGNITAEKLKKLGINKLCDTLSIEFDKLKGMIGEAKAKYLISLARDEYNEPI | |
| | | RTRVRKSIGRIVTMKRNSRNLEEIKPYLFRAIEESYYKLDKRIPKAIHVVAVTEDLDIVS | |
| | | RGRTFPHGISKETAYSESVKLLQKILEEDERKIRRIGVRF | |
| 301 | Protein | MIVLFVDFDYFYAQVEEVLNPSLKGKPVVVCVFSGRFEDSGAVATANYEARKFGVKA | Dpo4-Δ15 |
| | | GIPIVEAKKILPNAVYLPMRKEVYQQVSSRIMNLLREYGEKIEIASIDEAYLDISDKVRD | S96G/A155C/V203C, |
| | | YREAYNLGLEIKNKILEKEKITVTVGISKNKVFAKIACDMAKPNGIKVIDDEEVKRLIRE | |
| | | LDIADVPGIGNITAEKLKKLGINKLCDTLSIEFDKLKGMIGEAKAKYLISLARDEYNEPI | |
| | | RTRVRKSIGRIVTMKRNSRNLEEIKPYLFRAIEESYYKLDKRIPKAIHVVAVTEDLDIVS | |
| | | RGRTFPHGISKETAYSESVKLLQKILEEDERKIRRIGVRF | |
| 302 | Protein | MIVLFVDFDYFYAQVEEVLNPSLKGKPVVVCVFSGRFEDSGAVATANYEARKFGVKA | Dpo4-Δ15 |
| | | GIPIVEAKKILPNCVYLPMRKEVYQQVSSRIMNLLREYSEKIEIASIDEAYLDISDKVRD | A71C/A155C, |
| | | YREAYNLGLEIKNKILEKEKITVTVGISKNKVFAKIACDMAKPNGIKVIDDEEVKRLIRE | |
| | | LDIADVPGIGNITAEKLKKLGINKLVDTLSIEFDKLKGMIGEAKAKYLISLARDEYNEPI | |
| | | RTRVRKSIGRIVTMKRNSRNLEEIKPYLFRAIEESYYKLDKRIPKAIHVVAVTEDLDIVS | |
| | | RGRTFPHGISKETAYSESVKLLQKILEEDERKIRRIGVRF | |
| 303 | Protein | MIVLFVDFDYFYAQVEEVLNPSLKGKPVVVCVFSGRFEDSGAVATANYEARKFGVKA | Dpo4-Δ15 |
| | | GIPIVEAKKILPNAVYLPMRKEVYQQVSCRIMNLLREYSEKIEIASIDEAYLDISDKVRD | S86C/A155C/,, |
| | | YREAYNLGLEIKNKILEKEKITVTVGISKNKVFAKIACDMAKPNGIKVIDDEEVKRLIRE | |
| | | LDIADVPGIGNITAEKLKKLGINKLVDTLSIEFDKLKGMIGEAKAKYLISLARDEYNEPI | |
| | | RTRVRKSIGRIVTMKRNSRNLEEIKPYLFRAIEESYYKLDKRIPKAIHVVAVTEDLDIVS | |
| | | RGRTFPHGISKETAYSESVKLLQKILEEDERKIRRIGVRF | |
| 304 | Protein | MIVLFVDFDYFYAQVEEVLNPSLKGKPVVVSVFSGRFEDSGAVATANYEARKFGVKA | Dpo4-Δ15 |
| | | GIPIVEAKKILPNAVYLPMRKEVYQQVSSRIMNLLREYSEKIEIASIDEAYLDISDKVRD | C31S/A155C, |
| | | YREAYNLGLEIKNKILEKEKITVTVGISKNKVFAKIACDMAKPNGIKVIDDEEVKRLIRE | |
| | | LDIADVPGIGNITAEKLKKLGINKLVDTLSIEFDKLKGMIGEAKAKYLISLARDEYNEPI | |
| | | RTRVRKSIGRIVTMKRNSRNLEEIKPYLFRAIEESYYKLDKRIPKAIHVVAVTEDLDIVS | |
| | | RGRTFPHGISKETAYSESVKLLQKILEEDERKIRRIGVRF | |
| 305 | Protein | MIVLFVDFDYFYAQVEEVLNPSLKGKPVVVCVFSGRFEDSGAVATANYEARKFGVKA | Dpo4-Δ15 |
| | | GIPIVEAKKILPNAVYLPGRKEVYQQVSSRIMNLLREYSEKIEIASIDEAYLDISDKVRDY | M76G/A155C, |
| | | REAYNLGLEIKNKILEKEKITVTVGISKNKVFAKIACDMAKPNGIKVIDDEEVKRLIREL | |
| | | DIADVPGIGNITAEKLKKLGINKLVDTLSIEFDKLKGMIGEAKAKYLISLARDEYNEPIR | |
| | | TRVRKSIGRIVTMKRNSRNLEEIKPYLFRAIEESYYKLDKRIPKAIHVVAVTEDLDIVSR | |
| | | GRTFPHGISKETAYSESVKLLQKILEEDERKIRRIGVRF | |
| 306 | Protein | MIVLFVDFDYFYAQVEEVLNPSLKGKPVVVCVFSGRFEDSGAVATANYEARKFGVKA | Dpo4-Δ15 |
| | | GIPIVEAKKILPNAVYLPARKEVYQQVSSRIMNLLREYSEKIEIASIDEAYLDISDKVRDY | M76A/A155C, |
| | | REAYNLGLEIKNKILEKEKITVTVGISKNKVFAKIACDMAKPNGIKVIDDEEVKRLIREL | |
| | | DIADVPGIGNITAEKLKKLGINKLVDTLSIEFDKLKGMIGEAKAKYLISLARDEYNEPIR | |
| | | TRVRKSIGRIVTMKRNSRNLEEIKPYLFRAIEESYYKLDKRIPKAIHVVAVTEDLDIVSR | |
| | | GRTFPHGISKETAYSESVKLLQKILEEDERKIRRIGVRF | |
| 307 | Protein | MIVLFVDFDYFYAQVEEVLNPSLKGKPVVVCVFSGRFEDSGAVATANYEARKFGVKA | Dpo4-Δ15 |
| | | GIPIVEAKKCLPNAVYLPMRKEVYQQVSSRIMNLLREYSEKIEIASIDEAYLDISDKVRD | I67C/A155C, |
| | | YREAYNLGLEIKNKILEKEKITVTVGISKNKVFAKIACDMAKPNGIKVIDDEEVKRLIRE | |
| | | LDIADVPGIGNITAEKLKKLGINKLVDTLSIEFDKLKGMIGEAKAKYLISLARDEYNEPI | |
| | | RTRVRKSIGRIVTMKRNSRNLEEIKPYLFRAIEESYYKLDKRIPKAIHVVAVTEDLDIVS | |
| | | RGRTFPHGISKETAYSESVKLLQKILEEDERKIRRIGVRF | |
| 308 | Protein | MIVLFVDFDYFYAQVEEVLNPSLKGKPVVVCVFSGRFEDSGAVATANYEARKFGVKA | Dpo4-Δ15 |
| | | GIPIVEAKKILPNAVYLPMRKEVYQQVSGRIMNLLREYSEKIEIASIDEAYLDISDKVRD | S86G/A155C, |
| | | YREAYNLGLEIKNKILEKEKITVTVGISKNKVFAKIACDMAKPNGIKVIDDEEVKRLIRE | |
| | | LDIADVPGIGNITAEKLKKLGINKLVDTLSIEFDKLKGMIGEAKAKYLISLARDEYNEPI | |
| | | RTRVRKSIGRIVTMKRNSRNLEEIKPYLFRAIEESYYKLDKRIPKAIHVVAVTEDLDIVS | |
| | | RGRTFPHGISKETAYSESVKLLQKILEEDERKIRRIGVRF | |
| 309 | Protein | MIVLFVDFDYFYAQVEEVLNPSLKGKPVVVCVFSGRFEDSGAVATANYEARKFGVKA | Dpo4-Δ15 |
| | | GIPIVEAKKILPNAVYLPMRKEVYQQVSSRIMNLLREYGEKIEIASIDEAYLDISDKVRD | S96G/A155C, |
| | | YREAYNLGLEIKNKILEKEKITVTVGISKNKVFAKIACDMAKPNGIKVIDDEEVKRLIRE | |
| | | LDIADVPGIGNITAEKLKKLGINKLVDTLSIEFDKLKGMIGEAKAKYLISLARDEYNEPI | |
| | | RTRVRKSIGRIVTMKRNSRNLEEIKPYLFRAIEESYYKLDKRIPKAIHVVAVTEDLDIVS | |
| | | RGRTFPHGISKETAYSESVKLLQKILEEDERKIRRIGVRF | |
| 310 | Protein | MIVLFVDFDYFYAQVEEVLNPSLKGKPVVVCVFSGRFEDSGAVATANYEARKFGVKA | Dpo4-Δ15 |
| | | GIPIVEAKKILPNCVYLPMRKEVYQQVSSRIMNLLREYSEKIEIASIDEAYLDISDKVRD | A71C/V203C, |
| | | YREAYNLGLEIKNKILEKEKITVTVGISKNKVFAKIAADMAKPNGIKVIDDEEVKRLIRE | |
| | | LDIADVPGIGNITAEKLKKLGINKLCDTLSIEFDKLKGMIGEAKAKYLISLARDEYNEPI | |
| | | RTRVRKSIGRIVTMKRNSRNLEEIKPYLFRAIEESYYKLDKRIPKAIHVVAVTEDLDIVS | |
| | | RGRTFPHGISKETAYSESVKLLQKILEEDERKIRRIGVRF | |
| 311 | Protein | MIVLFVDFDYFYAQVEEVLNPSLKGKPVVVCVFSGRFEDSGAVATANYEARKFGVKA | Dpo4-Δ15 |
| | | GIPIVEAKKILPNAVYLPMRKEVYQQVSCRIMNLLREYSEKIEIASIDEAYLDISDKVRD | S86C/V203C, |
| | | YREAYNLGLEIKNKILEKEKITVTVGISKNKVFAKIAADMAKPNGIKVIDDEEVKRLIRE | |
| | | LDIADVPGIGNITAEKLKKLGINKLCDTLSIEFDKLKGMIGEAKAKYLISLARDEYNEPI | |
| | | RTRVRKSIGRIVTMKRNSRNLEEIKPYLFRAIEESYYKLDKRIPKAIHVVAVTEDLDIVS | |
| | | RGRTFPHGISKETAYSESVKLLQKILEEDERKIRRIGVRF | |
| 312 | Protein | MIVLFVDFDYFYAQVEEVLNPSLKGKPVVVSVFSGRFEDSGAVATANYEARKFGVKA | Dpo4-Δ15 |
| | | GIPIVEAKKILPNAVYLPMRKEVYQQVSSRIMNLLREYSEKIEIASIDEAYLDISDKVRD | C31S/V203C,, |
| | | YREAYNLGLEIKNKILEKEKITVTVGISKNKVFAKIAADMAKPNGIKVIDDEEVKRLIRE | |
| | | LDIADVPGIGNITAEKLKKLGINKLCDTLSIEFDKLKGMIGEAKAKYLISLARDEYNEPI | |
| | | RTRVRKSIGRIVTMKRNSRNLEEIKPYLFRAIEESYYKLDKRIPKAIHVVAVTEDLDIVS | |
| | | RGRTFPHGISKETAYSESVKLLQKILEEDERKIRRIGVRF | |
| 313 | Protein | MIVLFVDFDYFYAQVEEVLNPSLKGKPVVVCVFSGRFEDSGAVATANYEARKFGVKA | Dpo4-Δ15 |
| | | GIPIVEAKKILPNAVYLPGRKEVYQQVSSRIMNLLREYSEKIEIASIDEAYLDISDKVRDY | M76G/V203C, |
| | | REAYNLGLEIKNKILEKEKITVTVGISKNKVFAKIAADMAKPNGIKVIDDEEVKRLIREL | |
| | | DIADVPGIGNITAEKLKKLGINKLCDTLSIEFDKLKGMIGEAKAKYLISLARDEYNEPIR | |
| | | TRVRKSIGRIVTMKRNSRNLEEIKPYLFRAIEESYYKLDKRIPKAIHVVAVTEDLDIVSR | |
| | | GRTFPHGISKETAYSESVKLLQKILEEDERKIRRIGVRF | |
| 314 | Protein | MIVLFVDFDYFYAQVEEVLNPSLKGKPVVVCVFSGRFEDSGAVATANYEARKFGVKA | Dpo4-Δ15 |
| | | GIPIVEAKKILPNAVYLPARKEVYQQVSSRIMNLLREYSEKIEIASIDEAYLDISDKVRDY | M76A/V203C, |
| | | REAYNLGLEIKNKILEKEKITVTVGISKNKVFAKIAADMAKPNGIKVIDDEEVKRLIREL | |
| | | DIADVPGIGNITAEKLKKLGINKLCDTLSIEFDKLKGMIGEAKAKYLISLARDEYNEPIR | |
| | | TRVRKSIGRIVTMKRNSRNLEEIKPYLFRAIEESYYKLDKRIPKAIHVVAVTEDLDIVSR | |
| | | GRTFPHGISKETAYSESVKLLQKILEEDERKIRRIGVRF | |
| 315 | Protein | MIVLFVDFDYFYAQVEEVLNPSLKGKPVVVCVFSGRFEDSGAVATANYEARKFGVKA | Dpo4-Δ15 |
| | | GIPIVEAKKCLPNAVYLPMRKEVYQQVSSRIMNLLREYSEKIEIASIDEAYLDISDKVRD | I67C/V203C, |
| | | YREAYNLGLEIKNKILEKEKITVTVGISKNKVFAKIAADMAKPNGIKVIDDEEVKRLIRE | |
| | | LDIADVPGIGNITAEKLKKLGINKLCDTLSIEFDKLKGMIGEAKAKYLISLARDEYNEPI | |
| | | RTRVRKSIGRIVTMKRNSRNLEEIKPYLFRAIEESYYKLDKRIPKAIHVVAVTEDLDIVS | |
| | | RGRTFPHGISKETAYSESVKLLQKILEEDERKIRRIGVRF | |
| 316 | Protein | MIVLFVDFDYFYAQVEEVLNPSLKGKPVVVCVFSGRFEDSGAVATANYEARKFGVKA | Dpo4-Δ15 |
| | | GIPIVEAKKILPNAVYLPMRKEVYQQVSGRIMNLLREYSEKIEIASIDEAYLDISDKVRD | S86G/V203C, |
| | | YREAYNLGLEIKNKILEKEKITVTVGISKNKVFAKIAADMAKPNGIKVIDDEEVKRLIRE | |
| | | LDIADVPGIGNITAEKLKKLGINKLCDTLSIEFDKLKGMIGEAKAKYLISLARDEYNEPI | |
| | | RTRVRKSIGRIVTMKRNSRNLEEIKPYLFRAIEESYYKLDKRIPKAIHVVAVTEDLDIVS | |
| | | RGRTFPHGISKETAYSESVKLLQKILEEDERKIRRIGVRF | |
| 317 | Protein | MIVLFVDFDYFYAQVEEVLNPSLKGKPVVVCVFSGRFEDSGAVATANYEARKFGVKA | Dpo4-Δ15 |
| | | GIPIVEAKKILPNAVYLPMRKEVYQQVSSRIMNLLREYGEKIEIASIDEAYLDISDKVRD | S96G/V203C, |
| | | YREAYNLGLEIKNKILEKEKITVTVGISKNKVFAKIAADMAKPNGIKVIDDEEVKRLIRE | |
| | | LDIADVPGIGNITAEKLKKLGINKLCDTLSIEFDKLKGMIGEAKAKYLISLARDEYNEPI | |
| | | RTRVRKSIGRIVTMKRNSRNLEEIKPYLFRAIEESYYKLDKRIPKAIHVVAVTEDLDIVS | |
| | | RGRTFPHGISKETAYSESVKLLQKILEEDERKIRRIGVRF | |
| 318 | Protein | MIVLFVDFDYFYAQVEEVLNPSLKGKPVVVSVFSGRFEDSGAVATANYEARKFGVKA | Dpo4-Δ15 |
| | | GIPIVEAKKILPNAVYLPMRKEVYQQVSSRIMNLLREYSEKIEIASIDEAYLDISDKVRD | C31S/A155C, |
| | | YREAYNLGLEIKNKILEKEKITVTVGISKNKVFAKIACDMAKPNGIKVIDDEEVKRLIRE | |
| | | LDIADVPGIGNITAEKLKKLGINKLVDTLSIEFDKLKGMIGEAKAKYLISLARDEYNEPI | |
| | | RTRVRKSIGRIVTMKRNSRNLEEIKPYLFRAIEESYYKLDKRIPKAIHVVAVTEDLDIVS | |
| | | RGRTFPHGISKETAYSESVKLLQKILEEDERKIRRIGVRF | |
| 319 | Protein | MIVLFVDFDYFYAQVEEVLNPSLKGKPVVVSVFSGRFEDSGAVATANYEARKFGVKA | Dpo4-Δ15 |
| | | GIPIVEAKKILPNAVYLPMRKEVYQQVSSRIMNLLREYSEKIEIASIDEAYLDISDKVRD | C31S/V203C, |
| | | YREAYNLGLEIKNKILEKEKITVTVGISKNKVFAKIAADMAKPNGIKVIDDEEVKRLIRE | |
| | | LDIADVPGIGNITAEKLKKLGINKLCDTLSIEFDKLKGMIGEAKAKYLISLARDEYNEPI | |
| | | RTRVRKSIGRIVTMKRNSRNLEEIKPYLFRAIEESYYKLDKRIPKAIHVVAVTEDLDIVS | |
| | | RGRTFPHGISKETAYSESVKLLQKILEEDERKIRRIGVRF | |
| 320 | Protein | MIVLFVDFDYFYAQVEEVLNPSLKGKPVVVSVFSGRFEDSGAVATANYEARKFGVKA | Dpo4-Δ15 |
| | | GIPIVEAKKILPNAVYLPMRKEVYQQVSSRIMNLLREYSEKIEIASIDEAYLDISDKVRD | C31S/A155C/V203C, |
| | | YREAYNLGLEIKNKILEKEKITVTVGISKNKVFAKIACDMAKPNGIKVIDDEEVKRLIRE | |
| | | LDIADVPGIGNITAEKLKKLGINKLCDTLSIEFDKLKGMIGEAKAKYLISLARDEYNEPI | |
| | | RTRVRKSIGRIVTMKRNSRNLEEIKPYLFRATEESYYKLDKRIPKAIHVVAVTEDLDIVS | |
| | | RGRTFPHGISKETAYSESVKLLQKILEEDERKIRRIGVRF | |
| 321 | Protein | MIVLFVDFDYFYAQVEEVLNPSLKGKPVVVCVFSGRFEDSGAVATANYEARKFGVKA | Dpo4 S85C/A155C |
| | | GIPIVEAKKILPNAVYLPMRKEVYQQV [symbol] SRIMNLLREYSEKIEIASIDEAYLDISDKVRD | |
| | | YREAYNLGLEIKNKILEKEKITVTVGISKNKVFAKIA [symbol] DMAKPNGIKVIDDEEVKRLIRE | |
| | | LDIADVPGIGNITAEKLKKLGINKLVDTLSIEFDKLKGMIGEAKAKYLISLARDEYNEPI | |
| | | RTRVRKSIGRIVTMKRNSRNLEEIKPYLFRAIEESYYKLDKRIPKAIHVVAVTEDLDIVS | |
| | | RGRTFPHGISKETAYSESVKLLQKILEEDERKIRRIGVRFSKFIEAIGLDKFFDT | |
| 322 | Protein | MIVLFVDFDYFYAQVEEVLNPSLKGKPVVVCVFSGRFEDSGAVATANYEARKFGVKA | Dpo4 S85C/V203C |
| | | GIPIVEAKKILPNAVYLPMRKEVYQQV [symbol] SRIMNLLREYSEKIEIASIDEAYLDISDKVRD | |
| | | YREAYNLGLEIKNKILEKEKITVTVGISKNKVFAKIAADMAKPNGIKVIDDEEVKRLIRE | |
| | | LDIADVPGIGNITAEKLKKLGINKL [symbol] DTLSIEFDKLKGMIGEAKAKYLISLARDEYNEPI | |
| | | RTRVRKSIGRIVTMKRNSRNLEEIKPYLFRAIEESYYKLDKRIPKAIHVVAVTEDLDIVS | |
| | | RGRTFPHGISKETAYSESVKLLQKILEEDERKIRRIGVRFSKFIEAIGLDKFFDT | |
| 323 | Protein | MIVLFVDFDYFYAQVEEVLNPSLKGKPVVVCVFSGRFEDSGAVATANYEARKFGVKA | Dpo4 |
| | | GIPIVEAKKILPNAVYLPMRKEVYQQV [symbol] SRIMNLLREYSEKIEIASIDEAYLDISDKVRD | S85C/A155C/V203C |
| | | YREAYNLGLEIKNKILEKEKITVTVGISKNKVFAKIA [symbol] DMAKPNGIKVIDDEEVKRLIRE | |
| | | LDIADVPGIGNITAEKLKKLGINKL [symbol] DTLSIEFDKLKGMIGEAKAKYLISLARDEYNEPI | |
| | | RTRVRKSIGRIVTMKRNSRNLEEIKPYLFRAIEESYYKLDKRIPKAIHVVAVTEDLDIVS | |
| | | RGRTFPHGISKETAYSESVKLLQKILEEDERKIRRIGVRFSKFIEAIGLDKFFDT | |
| 324 | Protein | MIVLFVDFDYFYAQVEEVLNPSLKGKPVVVCVFSGRFEDSGAVATANYEARKFGVKA | Dpo4-Δ3 |
| | | GIPIVEAKKILPNAVYLPMRKEVYQQV [symbol] SRIMNLLREYSEKIEIASIDEAYLDISDKVRD | S85C/A155C |
| | | YREAYNLGLEIKNKILEKEKITVTVGISKNKVFAKIA [symbol] DMAKPNGIKVIDDEEVKRLIRE | |
| | | LDIADVPGIGNITAEKLKKLGINKLVDTLSIEFDKLKGMIGEAKAKYLISLARDEYNEPI | |
| | | RTRVRKSIGRIVTMKRNSRNLEEIKPYLFRAIEESYYKLDKRIPKAIHVVAVTEDLDIVS | |
| | | RGRTFPHGISKETAYSESVKLLQKILEEDERKIRRIGVRFSKFIEAIGLDKF | |
| 325 | Protein | MIVLFVDFDYFYAQVEEVLNPSLKGKPVVVCVFSGRFEDSGAVATANYEARKFGVKA | Dpo4-Δ3 |
| | | GIPIVEAKKILPNAVYLPMRKEVYQQV [symbol] SRIMNLLREYSEKIEIASIDEAYLDISDKVRD | S85C/V203C |
| | | YREAYNLGLEIKNKILEKEKITVTVGISKNKVFAKIAADMAKPNGIKVIDDEEVKRLIRE | |
| | | LDIADVPGIGNITAEKLKKLGINKL [symbol] DTLSIEFDKLKGMIGEAKAKYLISLARDEYNEPI | |
| | | RTRVRKSIGRIVTMKRNSRNLEEIKPYLFRAIEESYYKLDKRIPKAIHVVAVTEDLDIVS | |
| | | RGRTFPHGISKETAYSESVKLLQKILEEDERKIRRIGVRFSKFIEAIGLDKF | |
| 326 | Protein | MIVLFVDFDYFYAQVEEVLNPSLKGKPVVVCVFSGRFEDSGAVATANYEARKFGVKA | Dpo4-Δ3 |
| | | GIPIVEAKKILPNAVYLPMRKEVYQQV [symbol] SRIMNLLREYSEKIEIASIDEAYLDISDKVRD | S85C/A155C/V203C |
| | | YREAYNLGLEIKNKILEKEKITVTVGISKNKVFAKIA [symbol] DMAKPNGIKVIDDEEVKRLIRE | |
| | | LDIADVPGIGNITAEKLKKLGINKL [symbol] DTLSIEFDKLKGMIGEAKAKYLISLARDEYNEPI | |
| | | RTRVRKSIGRIVTMKRNSRNLEEIKPYLFRAIEESYYKLDKRIPKAIHVVAVTEDLDIVS | |
| | | RGRTFPHGISKETAYSESVKLLQKILEEDERKIRRIGVRFSKFIEAIGLDKF | |
| 327 | Protein | MIVLFVDFDYFYAQVEEVLNPSLKGKPVVVCVFSGRFEDSGAVATANYEARKFGVKA | Dpo4-Δ6 |
| | | GIPIVEAKKILPNAVYLPMRKEVYQQV [symbol] SRIMNLLREYSEKIEIASIDEAYLDISDKVRD | S85C/A155C |
| | | YREAYNLGLEIKNKILEKEKITVTVGISKNKVFAKIA [symbol] DMAKPNGIKVIDDEEVKRLIRE | |
| | | LDIADVPGIGNITAEKLKKLGINKLVDTLSIEFDKLKGMIGEAKAKYLISLARDEYNEPI | |
| | | RTRVRKSIGRIVTMKRNSRNLEEIKPYLFRAIEESYYKLDKRIPKAIHVVAVTEDLDIVS | |
| | | RGRTFPHGISKETAYSESVKLLQKILEEDERKIRRIGVRFSKFIEAIGL | |
| 328 | Protein | MIVLFVDFDYFYAQVEEVLNPSLKGKPVVVCVFSGRFEDSGAVATANYEARKFGVKA | Dpo4-Δ6 |
| | | GIPIVEAKKILPNAVYLPMRKEVYQQV [symbol] SRIMNLLREYSEKIEIASIDEAYLDISDKVRD | S85C/V203C |
| | | YREAYNLGLEIKNKILEKEKITVTVGISKNKVFAKIAADMAKPNGIKVIDDEEVKRLIRE | |
| | | LDIADVPGIGNITAEKLKKLGINKL [symbol] DTLSIEFDKLKGMIGEAKAKYLISLARDEYNEPI | |
| | | RTRVRKSIGRIVTMKRNSRNLEEIKPYLFRAIEESYYKLDKRIPKAIHVVAVTEDLDIVS | |
| | | RGRTFPHGISKETAYSESVKLLQKILEEDERKIRRIGVRFSKFIEAIGL | |
| 329 | Protein | MIVLFVDFDYFYAQVEEVLNPSLKGKPVVVCVFSGRFEDSGAVATANYEARKFGVKA | Dpo4-Δ6 |
| | | GIPIVEAKKILPNAVYLPMRKEVYQQV [symbol] SRIMNLLREYSEKIEIASIDEAYLDISDKVRD | S85C/A155C/V203C |
| | | YREAYNLGLEIKNKILEKEKITVTVGISKNKVFAKIA [symbol] DMAKPNGIKVIDDEEVKRLIRE | |
| | | LDIADVPGIGNITAEKLKKLGINKL [symbol] DTLSIEFDKLKGMIGEAKAKYLISLARDEYNEPI | |
| | | RTRVRKSIGRIVTMKRNSRNLEEIKPYLFRAIEESYYKLDKRIPKAIHVVAVTEDLDIVS | |
| | | RGRTFPHGISKETAYSESVKLLQKILEEDERKIRRIGVRFSKFIEAIGL | |
| 330 | Protein | MIVLFVDFDYFYAQVEEVLNPSLKGKPVVVCVFSGRFEDSGAVATANYEARKFGVKA | Dpo4-Δ9 |
| | | GIPIVEAKKILPNAVYLPMRKEVYQQV [symbol] SRIMNLLREYSEKIEIASIDEAYLDISDKVRD | S85C/A155C |
| | | YREAYNLGLEIKNKILEKEKITVTVGISKNKVFAKIA [symbol] DMAKPNGIKVIDDEEVKRLIRE | |
| | | LDIADVPGIGNITAEKLKKLGINKLVDTLSIEFDKLKGMIGEAKAKYLISLARDEYNEPI | |
| | | RTRVRKSIGRIVTMKRNSRNLEEIKPYLFRAIEESYYKLDKRIPKAIHVVAVTEDLDIVS | |
| | | RGRTFPHGISKETAYSESVKLLQKILEEDERKIRRIGVRFSKFIEA | |
| 331 | Protein | MIVLFVDFDYFYAQVEEVLNPSLKGKPVVVCVFSGRFEDSGAVATANYEARKFGVKA | Dpo4-Δ9 |
| | | GIPIVEAKKILPNAVYLPMRKEVYQQV [symbol] SRIMNLLREYSEKIEIASIDEAYLDISDKVRD | S85C/V203C |
| | | YREAYNLGLEIKNKILEKEKITVTVGISKNKVFAKIAADMAKPNGIKVIDDEEVKRLIRE | |
| | | LDIADVPGIGNITAEKLKKLGINKL [symbol] DTLSIEFDKLKGMIGEAKAKYLISLARDEYNEPI | |
| | | RTRVRKSIGRIVTMKRNSRNLEEIKPYLFRAIEESYYKLDKRIPKAIHVVAVTEDLDIVS | |
| | | RGRTFPHGISKETAYSESVKLLQKILEEDERKIRRIGVRFSKFIEA | |
| 332 | Protein | MIVLFVDFDYFYAQVEEVLNPSLKGKPVVVCVFSGRFEDSGAVATANYEARKFGVKA | Dpo4-Δ9 |
| | | GIPIVEAKKILPNAVYLPMRKEVYQQV [symbol] SRIMNLLREYSEKIEIASIDEAYLDISDKVRD | S85C/A155C/V203C |
| | | YREAYNLGLEIKNKILEKEKITVTVGISKNKVFAKI [symbol] CDMAKPNGIKVIDDEEVKRLIRE | |
| | | LDIADVPGIGNITAEKLKKLGINKL [symbol] DTLSIEFDKLKGMIGEAKAKYLISLARDEYNEPI | |
| | | RTRVRKSIGRIVTMKRNSRNLEEIKPYLFRAIEESYYKLDKRIPKAIHVVAVTEDLDIVS | |
| | | RGRTFPHGISKETAYSESVKLLQKILEEDERKIRRIGVRFSKFIEA | |
| 333 | Protein | MIVLFVDFDYFYAQVEEVLNPSLKGKPVVVCVFSGRFEDSGAVATANYEARKFGVKA | Dpo4-Δ12 |
| | | GIPIVEAKKILPNAVYLPMRKEVYQQV [symbol] SRIMNLLREYSEKIEIASIDEAYLDISDKVRD | S85C/A155C |
| | | YREAYNLGLEIKNKILEKEKITVTVGISKNKVFAKIA [symbol] DMAKPNGIKVIDDEEVKRLIRE | |
| | | LDIADVPGIGNITAEKLKKLGINKLVDTLSIEFDKLKGMIGEAKAKYLISLARDEYNEPI | |
| | | RTRVRKSIGRIVTMKRNSRNLEEIKPYLFRAIEESYYKLDKRIPKAIHVVAVTEDLDIVS | |
| | | RGRTFPHGISKETAYSESVKLLQKILEEDERKIRRIGVRFSKF | |
| 334 | Protein | MIVLFVDFDYFYAQVEEVLNPSLKGKPVVVCVFSGRFEDSGAVATANYEARKFGVKA | Dpo4-Δ12 |
| | | GIPIVEAKKILPNAVYLPMRKEVYQQV [symbol] SRIMNLLREYSEKIEIASIDEAYLDISDKVRD | S85C/V203C |
| | | YREAYNLGLEIKNKILEKEKITVTVGISKNKVFAKIAADMAKPNGIKVIDDEEVKRLIRE | |
| | | LDIADVPGIGNITAEKLKKLGINKL [symbol] DTLSIEFDKLKGMIGEAKAKYLISLARDEYNEPI | |
| | | RTRVRKSIGRIVTMKRNSRNLEEIKPYLFRAIEESYYKLDKRIPKAIHVVAVTEDLDIVS | |
| | | RGRTFPHGISKETAYSESVKLLQKILEEDERKIRRIGVRFSKF | |
| 335 | Protein | MIVLFVDFDYFYAQVEEVLNPSLKGKPVVVCVFSGRFEDSGAVATANYEARKFGVKA | Dpo4-A12 |
| | | GIPIVEAKKILPNAVYLPMRKEVYQQV [symbol] SRIMNLLREYSEKIEIASIDEAYLDISDKVRD | S85C/A155C/V203C |
| | | YREAYNLGLEIKNKILEKEKITVTVGISKNKVFAKIA [symbol] DMAKPNGIKVIDDEEVKRLIRE | |
| | | LDIADVPGIGNITAEKLKKLGINKL [symbol] DTLSIEFDKLKGMIGEAKAKYLISLARDEYNEPI | |
| | | RTRVRKSIGRIVTMKRNSRNLEEIKPYLFRAIEESYYKLDKRIPKAIHVVAVTEDLDIVS | |
| | | RGRTFPHGISKETAYSESVKLLQKILEEDERKIRRIGVRFSKF | |
| 336 | Protein | MIVLFVDFDYFYAQVEEVLNPSLKGKPVVVCVFSGRFEDSGAVATANYEARKFGVKA | Dpo4-Δ15 |
| | | GIPIVEAKKILPNAVYLPMRKEVYQQV [symbol] SRIMNLLREYSEKIEIASIDEAYLDISDKVRD | S85C/A155C |
| | | YREAYNLGLEIKNKILEKEKITVTVGISKNKVFAKIA [symbol] DMAKPNGIKVIDDEEVKRLIRE | |
| | | LDIADVPGIGNITAEKLKKLGINKLVDTLSIEFDKLKGMIGEAKAKYLISLARDEYNEPI | |
| | | RTRVRKSIGRIVTMKRNSRNLEEIKPYLFRAIEESYYKLDKRIPKAIHVVAVTEDLDIVS | |
| | | RGRTFPHGISKETAYSESVKLLQKILEEDERKIRRIGVRF | |
| 337 | Protein | MIVLFVDFDYFYAQVEEVLNPSLKGKPVVVCVFSGRFEDSGAVATANYEARKFGVKA | Dpo4-Δ15 |
| | | GIPIVEAKKILPNAVYLPMRKEVYQQV [symbol] SRIMNLLREYSEKIEIASIDEAYLDISDKVRD | S85C/V203C |
| | | YREAYNLGLEIKNKILEKEKITVTVGISKNKVFAKIAADMAKPNGIKVIDDEEVKRLIRE | |
| | | LDIADVPGIGNITAEKLKKLGINKL [symbol] DTLSIEFDKLKGMIGEAKAKYLISLARDEYNEPI | |
| | | RTRVRKSIGRIVTMKRNSRNLEEIKPYLFRAIEESYYKLDKRIPKAIHVVAVTEDLDIVS | |
| | | RGRTFPHGISKETAYSESVKLLQKILEEDERKIRRIGVRF | |
| 338 | Protein | MIVLFVDFDYFYAQVEEVLNPSLKGKPVVVCVFSGRFEDSGAVATANYEARKFGVKA | Dpo4-Δ15 |
| | | GIPIVEAKKILPNAVYLPMRKEVYQQV [symbol] SRIMNLLREYSEKIEIASIDEAYLDISDKVRD | S85C/A155C/V203C |
| | | YREAYNLGLEIKNKILEKEKITVTVGISKNKVFAKIA [symbol] DMAKPNGIKVIDDEEVKRLIRE | |
| | | LDIADVPGIGNITAEKLKKLGINKL [symbol] DTLSIEFDKLKGMIGEAKAKYLISLARDEYNEPI | |
| | | RTRVRKSIGRIVTMKRNSRNLEEIKPYLFRAIEESYYKLDKRIPKAIHVVAVTEDLDIVS | |
| | | RGRTFPHGISKETAYSESVKLLQKILEEDERKIRRIGVRF | |
| 339 | Protein | MIILFVDFDYFYAQVEEVLNPSLKGKPVVVCVFSGRFEDSGAVATANYEARKFGIKAG | Dpo 4 Sulfolobus |
| | | ISIVEAKKILPNAVYLPMRKEVYQQVSNRIMKLLREYSEKIEIASIDEAYLDISDKVKNY | islandicus |
| | | QDAYNLGLEIKNKILEKEKITVTVGISKNKVFAKIAADMAKPNGIKVIDDEEVKRLIVEL | |
| | | DIADIPGIGDITAEKLKKLGVNKLVDTLRIEFDELKGIIGEAKAKYLFSLARDEYNEPIRA | |
| | | RVRKSIGRIVTMKRNSRDLEEIKPYLFRAIEEAYYKLDKKIPKAIHVVAVTEDLDIVSRG | |
| | | RTFTHGISKETAYREAVRLLQKILEEDERKIRRIGVRFSKFIEAIGLDKFFDT | |
| 340 | Protein | MIILFVDFDYFYAQVEEVLDTSLKGKPVVVCVFSGRFEDSGAVATANYEARKFGIKAG | Dpo 4 Sulfolobus |
| | | IPIVEAKKILPNAVYLPMRKEVYQQVSNRIMRLLREYSEKIEIASIDEAYLDISDKVKDY | shibatae |
| | | QEAYNLGLEIKNKILEKEKITVTVGISKNKVFAKIAADMAKPNGIKVIDNDEVKRLIREL | |
| | | DIGDVPGVGSITAEKLKKLGVNKLVDTLRVEFGELKRIIGEAKAKYLYSLARDEYNEPI | |
| | | RARVRKSIGRIVTMKRNSRDLEEIKPYLFRAIEEAYHKLDKKIPKAIHVVAITEDLDIVS | |
| | | RGRTFTHGISKETAYKEAVKLLQKILEEDERKIRRIGVRFSKFIEAIGLDRFFNT | |
| 341 | Protein | MIILFVDFDYFYAQVEEVLNPSLKGKPVVVCVFSGRTENSGAVATANYEARKLGVKA | Dpo 4 Sulfolobus |
| | | GMPIVKAKEILPDAIYLPMRKEVYQQVSNRIMNILRKYSRKIEIASIDEAYLDISDKVNN | tengchongensis |
| | | YTDAYKIGLQIKNEIYEKEKITVTVGISKNKVFAKIAAEMAKPNGIKVIDDNEVKKLIRE | |
| | | IDIGEIPGVGEITTQKLKSLGINKLIDILNFDFMKIKKIVGEAKANYLFSLARDEYFGPVK | |
| | | ERVRKSIGRIVTLKKNSRNIEEIKPFLARSLDEAFNKLNGKIPKTIYLVAVMEDLDIISRG | |
| | | KTFPHGITKETAYKASLELLEKLLAEDKRKIRRIGVRFSKFIEATSLDKFFQF | |
| 342 | Protein | MIILFVDFDYFFAQVEEVLNPQYKGKPLIVCVYSGRNEKSGAVATANYEARKLGVKA | Dpo 4 Sulfolobus |
| | | GMPISRAMELAPNAIFVPMHKEVYTEVSNRIMSIISSYSDKIEIASIDEAYIDITSKVKNFE | tokodaii |
| | | EAIELGKKLKREIMEKEKITVTVGIAPNKVFAKIIADRVKPNGLGVVKPEEIEEFIKSIDI | |
| | | DEVPGVGNVISERLHSLGVNKLIDILSVSFDKLKEEIGEAKAFYLYRLATNSYFEPVLNK | |
| | | ERVPHGRYLTLPKNTRDIKVIELYLKKAIDEAYNKIEGIPKRMTVVTIMQDLDIVSKSK | |
| | | TFKTGISKERAYTESIELLKQILQKDSRLVRRVGVRFDNIYKSKGLDVFFNS | |
| 343 | Protein | MIVIFVDFDYFFAQVEEVLNPQYKGKPLVVCVYSGRTKTSGAVATANYEARKLGVKA | Dpo 4 Sulfolobus |
| | | GMPIIKAMQIAPSAIYVPMRKPIYEAFSNRIMNLLNKHADKIEVASIDEAYLDVTNKVE | acidocaldarius |
| | | GNFENGIELARKIKQEILEKEKITVTVGVAPNKILAKIIADKSKPNGLGVIRPTEVQDFLN | |
| | | ELDIDEIPGIGSVLARRLNELGIQKLRDILSKNYNELEKITGKAKALYLLKLAQNKYSEP | |
| | | VENKSKIPHGRYLTLPYNTRDVKVILPYLKKAINEAYNKVNGIPMRITVIAIMEDLDILS | |
| | | KGKKFKHGISIDNAYKVAEDLLRELLVRDKRRNVRRIGVKLDNIIINKTNLSDFFDI | |

[0181] It will be understood that the above is a representation of the molecules as they were used in connection with the instant invention. The attached sequence listing does only reflect the mere amino acid or nucleotide sequence thereof and not any further feature of said molecules as indicated in the above table.

[0182] The present invention is further illustrated by the figures, examples and the sequence listing from which further features, embodiments and advantages may be taken, wherein

[0183] FIG. 1 A shows composition of 1-gap D-DNA templates for activity test of L-polymerase X;

[0184] FIG. 1B shows composition of 6-gap D-DNA templates for activity test of L-polymerase X;

[0185] FIG. 2 A-B shows analytics of synthesized D-polypeptide product Ac-MLTLIQGKKIVNHLRSRLAFEYNGQLIKILSKNIVAVGSL-OGp (1) by UPLC (A) and mass spectrometry (B);

[0186] FIG. 3 A-B shows analytics of synthesized D-polypeptide product H-RREEKMLNDVDLLIIVPEKKLLKHVLPNIRIKGLSFSVKA-SMe (2) by UPLC (A) and mass spectrometry (B);

[0187] FIG. 4 A-B shows analytics of synthesized D-polypeptide product H-CGERKCVLFIEWEKKTYQLDLFTALAEEKPYAIFHFTGPV SYLIRIRAALKKKNYKLNQYGLFKNQTLVPLKITTEKELI KELGFTYRIPKKRL-OH (3) by UPLC (A) and mass spectrometry (B);

[0188] FIG. 5 A-B shows analytics of synthesized D-polypeptide product Ac-MLTLIQGKKIVNHLRSRLAFEYNGQLIKILSKNIVAVGSLRREEK MLNDVDLLIIVPEKKLLKHVLPNIRIKGLSFSVKA-SMe (4) by UPLC (A) and mass spectrometry (B);

[0189] FIG. 6 A-B shows analytics of native chemical ligation D-polypeptide product Ac-MLTLIQGKKIVNHLRSRLAFEYNGQLIKILSKNIVAVGSLRREEK MLNDVDLLIIVPEKKLLKHVLPNIRIKGLSFSVKACGERKCVLFIE WEKKTYQLDLFTALAEEKPYAIFHFTGPVSYLIRIRAALKKKNY KLNQYGLFKNQTLVPLKITTEKELIKELGFTYRIPKKRL-OH (5) by SDS-PAGE (A) and mass spectrometry (B);

[0190] FIG. 7 shows composition of 1-gap L-DNA templates for activity test of D-polymerase X;

[0191] FIG. 8 shows gel electrophoresis of L-DNA elongation activity assay of D-polymerase X on 1-gap substrates;

[0192] FIG. 9A shows composition of 6-gap L-DNA templates for activity test of D-polymerase X;

[0193] FIG. 9B shows gel electrophoresis of L-DNA elongation activity assay of D-polymerase X on 6-gap substrate;

[0194] FIG. 10A shows primer-template complex D-DNA substrate for activity assay of L-polymerase X;

[0195] FIG. 10B shows gel electrophoresis of D-DNA elongation activity assay of L-polymerase X performed at constant temperature;

[0196] FIG. 10C shows gel electrophoresis of D-DNA elongation activity assay of L-polymerase X performed using thermal cycling;

[0197] FIG. 11 A-B shows analytics of synthetic all-L-polymerase dpo4 variant A155C by SDS-PAGE (A) and LC-ESI mass spectometry (B);

[0198] FIG. 12 A shows gel electrophoresis of D-DNA PCR activity assays of L-polymerase dpo4 variants A155C, V203C, C31S and A155C/V203C;

[0199] FIG. 12 B shows gel electrophoresis of D-DNA PCR activity assays of recombinant and synthetic L-polymerase dpo4;

[0200] FIG. 12 C shows gel electrophoresis of D-DNA PCR activity assays of L-polymerase dpo4 variants A71C/A155C/V203C, S86C/A155C/V203C and C31S/S86C/A155C/V203C;

[0201] FIG. 12 D shows gel electrophoresis of D-DNA PCR activity assays of L-polymerase dpo4 variants M76G/A155C/V203C and M76A/A155C/V203C;

[0202] FIG. 12 E shows gel electrophoresis of D-DNA PCR activity assays of L-polymerase dpo4 variants 167C/A155C/V203C, S86G/A155C/V203C and S96C/A155C/V203C;

[0203] FIG. 12 F shows gel electrophoresis of D-DNA PCR activity assays of L-polymerase dpo4 C-terminus truncation forms Δ3, Δ6, Δ9, Δ12 and Δ15;

[0204] FIG. 13 shows analytics of synthesized D-polypeptide product H-RTFPHGISKETAYSESVKLLQKILEEDERKIRRIGVRFSKFIEAIGL DKFFDT-NH2 (1) by mass spectrometry;

[0205] FIG. 14 shows analytics of synthesized D-polypeptide product Boc-VDTLSIEFDKLKGMIGEAKAKYLISLARDEYNEPIRTRVRKSIGRI VTMKRNSRNLEEIKPYLFRAIEESYYKLDKRIPKAIHVVAVTEDL DIVSRG-OH (2) by mass spectrometry;

[0206] FIG. 15 shows analytics of fragment condensation D-polypeptide product H-VDTLSIEFDKLKGMIGEAKAKYLISLARDEYNEPIRTRVRKSIG RIVTMKRNSRNLEEIKPYLFRAIEESYYKLDKRIPKAIHVVAVTE DLDIVSRGRTFPHGISKETAYSESVKLLQKILEEDERKIRRIGVRFS KFIEAIGLDKFFDT-NH₂ (3) by mass spectrometry;

[0207] FIG. 16 A-B shows analytics of synthesized D-polypeptide product Z-CDMAKPNGIKVIDDEEVKRLIRELDIADVPGIGNITAEKLKKLG INKL-benzyl-thioester (4) by RP-HPLC (A) and mass spectrometry (B);

[0208] FIG. 17 A-B shows analytics of synthesized D-polypeptide product H-RKEVYQQVSSRIMNLLREYSEKIEIASIDEAYLDISDKVRDYREA YNLGLEIKNKILEKEKITVTVGISKNKVFAKIA-SMe (7) by UPLC (A) and mass spectrometry (B);

[0209] FIG. 18 A-B shows analytics of synthesized D-polypeptide product Ac-MIVLFVDFDYFYAQVEEVLNPSLKGKPVVVCVFSGRFEDSGAV ATANYEARKFGVKAGIPIVEAKKILPNAVYLPM-OGp (6) by UPLC (A) and mass spectrometry (B);

[0210] FIG. 19 A-B shows analytics of clostripain mediated D-polypeptide ligation product Ac-MIVLFVDFDYFYAQVEEVLNPSLKGKPVVVCVFSGRFEDSG AVATANYEARKFGVKAGIPIVEAKKILPNAVYLPMRKEVYQQV SSRIMNLLREYSEKIEIASIDEAYLDISDKVRDYREAYNLGLEIKN KILEKEKITVTVGISKNKVFAKIA-SMe (8) by SDS-PAGE (A) and ESI mass spectrometry (B);

[0211] FIG. 20 A-B shows analytics of native chemical ligation product of all-L-polymerase dpo4 fragment 155-352 (V203C) by SDS-PAGE (A) and LC-ESI mass spectometry (B);

[0212] FIG. 21 shows analytics of synthesized D-polypeptide product H-CVYLPMRKEVYQQVSSRIMNLLREYSEKIEIASIDEAYLDISDKV RDYREAYNLGLEIKNKILEKEKITVTVGISKNKVFAKIA-SBz1 (9) by UPLC;

[0213] FIG. 22 shows analytics of synthesized D-polypeptide product H-CVYLPMRKEVYQQVSSRIMNLLREYSEKIEIASIDEAYLDISDKV RDYREAYNLGLEIKNKILEKEKITVTVGISKNKVFAKIA-SBz1 (9) by mass spectrometry;

[0214] FIG. 23 shows analytics of synthesized D-polypeptide product Ac-MIVLFVDFDYFYAQVEEVLNPSLKGKPVVVCVFSGRFEDSGAV ATANYEARKFGVKAGIPIVEAKKILPN-SBz1 (11) by UPLC;

[0215] FIG. 24 shows analytics of synthesized D-polypeptide product Ac-MIVLFVDFDYFYAQVEEVLNPSLKGKPVVVCVFSGRFEDSGAV ATANYEARKFGVKAGIPIVEAKKILPN-SBz1 (11) by mass spectrometry;

[0216] FIG. 25 A-B shows analytics of synthesized D-polypeptide product Z-CDMAKPNGIKVIDDEEVKRLIRELDIADVPGIGNITAEKLKKLGIN KL-benzyl-thioester (7) by UPLC (A) and ESI-LC-MS (B);

[0217] FIG. 26 A-B shows analytics of all-D-peptide native chemical ligation product H-CDMAKPNGIKVIDDEEVICRLIRELDIADVPGIGNITAEKLKKLGIN KLCDTLSIEFDKLKGMIGEAKAKYLISLARDEYNEPIRTRVRKSIG RIVTMKRNSRNLEEIKPYLFRAIEESYYKLDKRIPKAIHVVAVTE DLDIVSRGRTFPHGISKETAYSESVKLLQKILEEDERKIRRIG VRFSKFIEAIGLDKFFDT-NH2 (8) by SDS-PAGE (A) and ESI-LC-MS (B);

[0218] FIG. 27 A-B shows analytics of all-D-peptide native chemical ligation product Ac-MIVLFVDFDYFYAQVEEVLNPSLKGKPVVVCVFSGRFEDSGAV ATANYEARKFGVKAGIPIVEAKKILPNCVYLPMRKEVYQQVSSR IMNLLREYSEKIEIASIDEAYLDISDKVRDYREAYNLGLEIKNKIL EKEKITVTVGISKNKVFAKIA-SBz1 (11) by SDS-PAGE (A) and ESI-LC-MS (B);

[0219] FIG. 28 A-C shows analytics of all-D-polymerase Dpo4 variant A71C/A155C/V203C native chemical ligation product by SDS-PAGE (A and B) and ESI-LC-MS (C);

[0220] FIG. 29 shows analytics of synthesized D-polypeptide product H-RKEVYQQVSSRIMNLLREYSEKIEIASIDEAYLDISDKVRDYREA YNLGLEIKNKILEKEKITVTVGISKNKVFAKIA-SBz1 (9) by UPLC;

[0221] FIG. 30 shows analytics of synthesized D-polypeptide product H-RKEVYQQVSSRIMNLLREYSEKIEIASIDEAYLDISDKVRDYREA YNLGLEIKNKILEKEKITVTVGISKNKVFAKIA-SBz1 (9) by mass spectrometry;

[0222] FIG. 31 shows analytics of synthesized D-polypeptide product Ac-MIVLFVDFDY FYAQVEEVLNP SLKGKPVVV CVFSGRFEDS GAVATANYEA RKFGVKAGIP IVEAKKILPN AVYLPG-OGp (10) by UPLC;

[0223] FIG. 32 shows analytics of synthesized D-polypeptide product Ac-MIVLFVDFDY FYAQVEEVLNP SLKGKPVVV CVFSGRFEDS GAVATANYEA RKFGVKAGIP IVEAKKILPN AVYLPG-OGp (10) by mass spectrometry;

[0224] FIG. 33 A-B shows analytics of protease catalyzed all-D ligation product Ac-MIVLFVDFDYFYAQVEEVLNPSLKGKPVVVCVFSGRFEDSGAV ATANYEARKFGVKAGIPIVEAKKILPNAVYLPGRKEVYQQVSSRI MNLLREYSEKIEIASIDEAYLDISDKVRDYREAYNLGLEIKNKILE KEKITVTVGISKNKVFAKIA-SBz1 (11) by SDS-PAGE (a) and ESI-LC-MS (B);

[0225] FIG. 34 shows analytics of synthesized crude all-D peptide H-KAIHVVAVT EDLDIVSRGR TFPHGISKET AYSESVKLLQ KILEEDERKI RRIGVRFSKF IEAIGLDKFF DT-NH₂ (1) UPLC profile (a) and mass spectrum (b);

[0226] FIG. 35 shows analytics of synthesized crude all-D peptide H-CDTLSIEF DKLKGMIGEA KAKYLISLAR DEYNEPIRTR VRKSIGRIVT MKRNSRNLEE IKPYLFRAIE ESYYKLDKRI P-OH (3) UPLC profile (a) and mass spectrum (b);

[0227] FIG. 36 shows analytics of H-CDTLSIEF DKLKGMIGEA KAKYLISLAR DEYNEPIRTR VRKSIGRIVT MKRNSRNLEE IKPYLFRAIE ESYYKLDKRI PKAIHVVAVT EDLDIVSRGR TFPHGISKET AYSESVKLLQ KILEEDERKI RRIGVRFSKF IEAIGLDKFF DT-NH₂ (5) synthesized by fragment condensation UPLC profile (a) and mass spectrum (b);

[0228] FIG. 37 shows analytics of synthesized and purified all-D peptide H-CVYLPMRKEV YQQVSSRIMN LLREYSEKIE IASIDEAYLD ISDKVRDYRE AYNLGLEIKN KILEKEKITV TVGISKNKVF AKIA-NHNH₂ (9) UPLC profile (a) and mass spectrum (b).

### EXAMPLES

[0229] Abbreviation as used in the examples.
[0230] ACN acetonitrile (Sigma-Aldrich Chemie GmbH, Schnelldorf, Deutschland)
[0231] DCMdichloromethane (Sigma-Aldrich Chemie GmbH, Schnelldorf, Deutschland)
[0232] DIPEA N,N-diisipropylamine (Sigma-Aldrich Chemie GmbH, Schnelldorf, Deutschland)
[0233] EDT (Sigma-Aldrich Chemie GmbH, Schnelldorf, Deutschland)
[0234] Fmoc 9-Fluorenyl-methoxycarbonyl-
[0235] HATU (2-(7-Aza-1H-benzotriazole-1-yl)-1,1,3,3-tetramethyluronium hexafluorophosphate) (CreoSalus, Louisville Ky., USA)
[0236] HFIP 1,1,1,3,3,3-hexafluorophosphate(Sigma-Aldrich Chemie GmbH, Schnelldorf, Deutschland)
[0237] HPLC High-performance liquid chromatography (sometimes referred to as high-pressure liquid chromatography)
[0238] MeIm methyl imidazole (Sigma-Aldrich Chemie GmbH, Schnelldorf, Deutschland)
[0239] MeOH methanol (Sigma-Aldrich Chemie GmbH, Schnelldorf, Deutschland)
[0240] MSNT 1-(Mesitylene-2-sulfonyl)-3-nitro-1,2,4-triazole (Merck KGaA, Darmstadt, Germany)
[0241] NMP N-methyl-pyrrolidone (Iris Biotech GmbH, Marktredwitz, Deutschland)
[0242] PyBOP (Benzotriazol-1-yloxy)tripyrrolidinophosphoniumhexafluorophosphat (MERCK KGAA, DARMSTADT, GERMANY)
[0243] SDS Sodium dodecyl sulfate (Sigma-Aldrich Chemie GmbH, Schnelldorf, Deutschland)
[0244] TBTU O-(Benzotriazol-1-yl)-N,N,N′,N′-tetramethyluroniumtetrafluoroborat (Merck KGaA, Darmstadt, Germany)
[0245] tBu (tert.-Butyl-)
[0246] TFA trifluoroacetic acid (Sigma-Aldrich Chemie GmbH, Schnelldorf, Deutschland)
[0247] TFE 1,1,1-trifluoroethanol(Sigma-Aldrich Chemie GmbH, Schnelldorf, Deutschland)
[0248] THF (Sigma-Aldrich Chemie GmbH, Schnelldorf, Deutschland)
[0249] TIS (Sigma-Aldrich Chemie GmbH, Schnelldorf, Deutschland)
[0250] TLC Thin layer chromatography
[0251] Tris Tris(hydroxymethyl)aminomethane (Sigma-Aldrich Chemie GmbH, Schnelldorf, Deutschland)
[0252] UPLC Ultra-performance liquid chromatography

### EXAMPLE 1

### Recombinant Expression and Purification of Wild-Type and Variants of Polymerase X

[0253] Polymerase X from African swine fever virus (abbr. ASFV) was described and characterized by Oliveros et al in 1997. The wild-type gene of the polymerase X has an open reading frame (abbr. ORF) of only 525 base pairs including start codon and stop codon (Oliveros et al, 1997). The encoded protein has a length of only 174 amino acids. This example describes how polymerase X as well as variants thereof have been expressed in E. coli and been purified using a His₆-Tag.

[0254] 1.1 Expression Constructs

[0255] Since the codon usage of ASFV differs from E. coli, an E. coli-codon-optimized synthetic gene for polymerase X was purchased from GeneArt AG (Regensburg, Germany). The synthetic gene sequence was provided in pCR4-Blunt-TOPO vector (originator company: Invitrogen, Karlsruhe, Germany). The codon-optimized open reading frame including start codon and two stop codons had the following sequence:

ATGCTGACCCTGATTCAGGGCAAAAAAATCGTGAACCATCTGCGTAGCCG
TCTGGCCTTTGAATATAACGGCCAGCTGATTAAAATTCTGAGCAAAAACA
TTGTGGCGGTGGGCAGCCTGCGTCGTGAAGAAAAAATGCTGAACGATGTG
GATCTGCTGATTATTGTGCCGGAAAAAAAACTGCTGAAACATGTGCTGCC
GAACATTCGTATTAAAGGCCTGAGCTTTAGCGTGAAAGTGTGCGGCGAAC
GTAAATGCGTGCTGTTTATCGAATGGGAAAAAAAAACCTACCAGCTGGAC
CTGTTTACCGCGCTGGCCGAAGAAAAACCGTATGCGATCTTTCATTTTAC
CGGTCCGGTGAGCTATCTGATTCGTATTCGTGCGGCGCTGAAAAAAAAAA
ACTACAAACTGAACCAGTATGGCCTGTTTAAAAACCAGACCCTGGTGCCG
CTGAAAATTACCACCGAAAAAGAACTGATTAAAGAACTGGGCTTTACCTA
TCGCATTCCGAAAAAACGCCTGTAATAA.

[0256] In order to obtain an expression construct for polymerase X, also referred to as all-L polymerase X, the gene of the polymerase X was cut out from pCR4-Blunt-TOPO with BamHI and PstI and subcloned in pRSET-A vector (Invitrogen, Karlsruhe, Germany). Subcloning added a His₆-Tag to the N-terminus, and brought the gene under control of the T7 promoter. The construct was named pMJ14 and was used for expression of all-L polymerase X in E. coli. The protein polymerase X expressed from pMJ14 had the following sequence of 210 amino acids:

MRGSHHHHHHGMASMTGGQQMGRDLYDDDDKDRWGSMLTLIQGKKIVNHL
RSRLAFEYNGQLIKILSKNIVAVGSLRREEKMLNDVDLLIIVPEKKLLKH
VLPNIRIKGLSFSVKVCGERKCVLFIEWEKKTYQLDLFTALAEEKPYAIF
HFTGPVSYLIRIRAALKKKNYKLNQYGLFKNQTLVPLKITTEKELIKELG
FTYRIPKKRL.

[0257] The initial 36 amino acids represented the His₆-Tag including a few spacer amino acids and some other sequence tags (T7 Gene 10 leader, Anti-Express Epitope). The final 174 amino acid part was identical to the polymerase X protein sequence as found in ASFV.

[0258] Expression constructs for variants of all-L polymerase X were made using the commercially available QuikChange kit (Stratagene GmbH, Waldbronn, Germany) according to manufacturer's protocol. Plasmid pMJ14 served as template. Oligonucleotides needed for QuikChange were either synthesized at the NOXXON facility (QC10_up, QC10_low) or purchased from Purimex (Grebenstein, Germany) (QC26_up, QC26_low, QC27_up, QC27_low, QC31_up, QC31_low). The following variant expression constructs were made and used for expression of the variants of the all-L polymerase in E. coli:

| | expression | |
|---|---|---|
| variant | construct | oligonucleotides used for QuikChange mutagenesis procedure |
| I124G | pMJ130 | QC10_up |
| | | (5′-TCCGGTGAGCTATCTGGGTCGTATTCGTGCGGCG-3′) |
| | | QC10_low |
| | | (5′-CGCCGCACGAATACGACCCAGATAGCTCACCGGA-3′) |
| V80G | pMJ356 | QC26_up |
| | | (5′-TGAGCTTTAGCGTGAAAGGGTGCGGCGAACG-3′) |
| | | QC26_low |
| | | (5′-CGTTCGCCGCACCCTTTCACGCTAAAGCTCA-3′) |
| V80A | pMJ357 | QC27_up |
| | | (5′-TGAGCTTTAGCGTGAAAGCGTGCGGCGAACG-3′) |
| | | QC27_low |
| | | (5′-CGTTCGCCGCACGCTTTCACGCTAAAGCTCA-3′) |
| C86S | pMJ412 | QC31_up |
| | | (5′-TGAAAGTGTGCGGCGAACGTAAAAGCGTGCTGTTTA-3′) |
| | | QC31_low |
| | | (5′-TAAACAGCACGCTTTTACGTTCGCCGCACACTTTCA-3′) |

[0259] 1.2 Protein Expression in E. coli

[0260] All-L-polymerase X was expressed in E. coli using expression construct pMJ14. Variants of the all-L-polymerase X were expressed from pMJ130, pMJ356, pMJ357 or pMJ412. For expression, the appropriate expression construct was transformed in competent E. coli strain ‘BL-21 (DE3) pLysS’ (Novagen/VWR, Dresden, Germany) and maintained with the antibiotic Ampicillin. The culture was grown at 37° C. in 2YT medium until the optical density at 600 nm reached approx. 0.6. Then protein expression was induced by adding Isopropyl beta-D-1-thiogalactopyranoside (abbr. IPTG) to a final concentration of 0.4 mM. Expression was performed for 4 hours at 30° C. Cells were harvested by centrifugation and either stored at −80° C. or immediately processed.

[0261] 1.3 Protein purification

[0262] Fresh or frozen E. coli cells were resuspended on ice in ‘lyse and bind buffer’ (50 mM Na-Phosphate, pH 7.5, 500 mM NaCl, 40 mM Imidazole) and lysed using a ‘French Press’ (G. Heinemann, Schwäbisch Gmünd, Germany) cell disrupter. Purification was done at 4° C. using ‘Ni-NTA Superflow’ material (Qiagen, Hilden, Germany). Step elution was done with elution buffer (50 mM Na-Phosphate, pH 7.5, 500 mM NaCl, 200 mM Imidazole). Fractions were analyzed using SDS-PAGE (Invitrogen, Karlsruhe, Germany), pooled and, if required, further purified with anion-ion-exchange chromatography on an ‘ÄKTA purifier’ system using ‘Q Sepharose fast flow’ material (GE healthcare, Freiburg, Germany). Protein identity was confirmed by MALDI mass spectometry and correct fractions were pooled, concentrated and re-buffered. Purified protein was stored at −20° C. in a buffer consisting of 25 mM Na-Phosphate, pH 7.5, 250 mM NaCl, 50% glycerol. Protein concentrations were estimated by BCA-protein assay (Pierce/Perbio Science, Bonn, Germany) using a bovine serum albumin (abbr. BSA) standard.

### EXAMPLE 2

### Activity Confirmation of Polymerase X and Variants of Polymerase X

[0263] The activity assays for the all-L-polymerase X and variants of all-L-polymerase X (see Example 1) were done with different types of substrate complexes formed by oligonucleotides, wherein the substrates and oligonucleotides consists of D-DNA-nucleotides.

[0264] 2.1 Activity Assays on Substrates with 1-Nucleotide Gap

[0265] List of oligonucleotides for the 1-gap substrates:

| | Length, | |
|---|---|---|
| Name | nt | Sequence (5′→3′) |
| SP-1 | 15 | GATCACAGTGAGTAC |
| D(g1)P | 17 | Phosphate-GTAAAACGACGGCCAGT |
| MJ_1_140_DD | 33 | ACTGGCCGTCGTTTTACAGTACTCACTGTGATC |
| MJ_1_141_DD | 33 | ACTGGCCGTCGTTTTACCGTACTCACTGTGATC |
| MJ_1_142_DD | 33 | ACTGGCCGTCGTTTTACGGTACTCACTGTGATC |
| SP1c + 18(g1) | 33 | ACTGGCCGTCGTTTTACTGTACTCACTGTGATC |

[0266] Substrate complexes were made by annealing a template strand of a DNA oligonucleotide consisting of 33 nucleotides (also referred to as lower strand) with two different DNA oligonucleotides consisting of 15 and 17 nucleotides, respectively, which hybridized to the template strand at its 5′-end and 3′end, respectively, resulting in a gap of one nucleotide in the upper strand. The complexes contained either A, C, G or T at the template position within the gap. Before annealing, oligonucleotide SP-1 consisting of 15 nucleotides was radioactively labeled at its 5′-end with ³²P by a standard kinase reaction employing Gamma-³²P-Adenosine-Triphosphate (ATP) and T4 polynucleotide kinase. Annealing was done in 10 mM Tris-HCl, 5 mM MgCl₂, pH 8.0 by heating 10 mM at 65° C. and slowly cooling down. Unincorporated gamma-³²P-ATP was removed by purification over NAP-columns (GE healthcare).

[0267] In the activity assay, all-L-polymerase X and the variants thereof were combined with D-configurated 1-gap substrate complexes (see FIG. 1A). As a negative control, each substrate was also incubated without all-L-polymerase X and variants thereof and D-desoxy-nucleotide-triphosphates (dNTP's). Depending on the template base within the 1-gap complex only the corresponding D-dNTP was added during the assay. A typical 6 μl assay contained 50 nM substrate complex, 1.7 ng/μl L-all-L-polymerase X or variants thereof, 8 μM of one D-dNTP and buffer (50 mM Tris-HCl, 10 mM MgCl₂, 4% glycerol, 0.1 mg/ml bovine serum albumin (BSA), pH 7.5). D-dNTP's were purchased from Rovalab (Teltow, Germany). The incubation time was 30 minutes at 37° C. The whole assay volume was mixed with sample buffer/dye, loaded on a denaturing sequencing gel a separated for 4 hours. The gel was exposed to Kodak K screen overnight at −80° C. and read out using BioRad Fx phosphoimager system.

[0268] All-L-polymerase X and the variants 1124G, V80A and V80G were active under these conditions and filled the 1 nucleotide gap between the two upper strand DNA oligonucleotides.

[0269] 2.2 Activity Assay on a Substrate with 6-Nucleotide Gap

[0270] List of oligonucleotides for the 6-gap substrate:

| | Length, | |
|---|---|---|
| Name | nt | Sequence (5′→3′) |
| SP-1 | 15 | GATCACAGTGAGTAC |
| D(g6)P | 12 | Phosphate-ACGACGGCCAGT |
| SP1c + 18 (g6) | 33 | ACTGGCCGTCGTTCTATTGTACTCACTGTGATC |

[0271] Substrate complexes were made by annealing a template strand of a DNA oligonucleotide consisting of 33 nucleotides (referred to as lower strand) with two different DNA oligonucleotides consisting of 15 and 12 nucleotides, respectively, which hybridized to the template strand at its 5′-end and 3′end, respectively, resulting in a gap of six nucleotides in the upper strand. Before annealing, oligonucleotide SP-1 consisting of 15 nucleotides was radioactively labeled at its 5′-end with ³²P by a standard kinase reaction employing Gamma-³²P-Adenosine-Triphosphate (ATP) and T4 polynucleotide kinase. Annealing was done in 10 mM Tris-HCl, 5 mM MgCl₂, pH 8.0 by heating 10 min at 65° C. and slowly cooling down. Unincorporated gamma-³²P-ATP was removed by purification over NAP-columns (GE healthcare, Freiburg, Germany).

[0272] In the activity assay, all-L-polymerase X and variants thereof were combined with D-configurated 6-gap substrate complex (FIG. 1B). As a negative control, the substrate was also incubated without all-L-polymerase X or variants thereof and desoxy-nucleotide-triphosphates (D-dNTP's). A typical 6 μl assay contained 50 nM substrate complex, up to 1.3 ng/μl all-L-polymerase X or variants thereof, 8 μM each of the D-dNTP's and buffer (50 mM Tris-HCl, 10 mM MgCl2, 4% glycerol, 0.1 mg/ml bovine serum albumin (BSA), pH 7.5). D-dNTP's were purchased from Rovalab (Teltow, Germany). A typical incubation time was 30 minutes at 37° C. The whole assay volume was mixed with sample buffer/dye, loaded on a denaturing sequencing gel a separated for 4 hours. The gel was exposed to Kodak K screen overnight at −80° C. and read out using BioRad Fx phosphoimager system.

[0273] All-L-polymerase X and the variants (except C86S) were active under these conditions and filled the 6 nucleotide gap between the two upper strand DNA oligonucleotides.

### EXAMPLE 3

### Synthesis of a Variant of Polymerase Pol X Consisting of D-Amino Acids

[0274] Within the example the synthesis of the all-D polymerase X variant V80A is described. The amino acid sequence of the all-D polymerase X variant V80A is Ac-MLTLIQGKKIVNHLRSRLAFEYNGQLIKILSKNIVAVGSLRREEKMLNDVDLLIIVPEK KLLKHVLPNIRIKGLSFSVKACGERKCVLFIEWEKKTYQLDLFTALAEEKPYAIFHFTG PVSYLIRIRAALKKKNYKLNQYGLFKNQTLVPLKITTEKELIKELGFTYRIPKKRL-OH.

[0275] All amino acids used are protected according to the Solid-phase peptide synthesis Fmoc/tBu-strategy requirements (Eric Atherton et al., 1981). All amino acids used are D-amino acids (Bachem, Bubendorf, Switzerland).

[0276] 3.1 Synthesis of HO-Gp(Boc)₂

[0277] The tert-butyloxycarbonyl-protected 4-guanidinophenol was synthesized in analogy to Sekizaki et al. (Sekizaki et al., 1996). According to this 40 mmol N,N′-Bis-(tert-butyloxycarbonyl)-S-methylisothiourea (Sigma-Aldrich Chemie GmbH, Schnelldorf, Deutschland) and 60 mmol 4-aminophenol (Sigma-Aldrich Chemie GmbH, Schnelldorf, Deutschland) were dissolved in 250 ml THF in a 500 ml bottom round flask. Following this the solution was argon flushed for 10 min and kept stirring for 120 hours while sealed with a CaCl₂ tube.

[0278] After evaporating the solvent the residue was precipitated with ice cold methanol. The precipitate was dried under vacuum over P₄O₁₀. Finally the product was purified using flash chromatography with DCM. Product containing fractions were combined and the solvent was evaporated under reduced pressure. TLC, reversed phase HPLC, mass spectrometry and NMR were used for analytics. The experimentally determined mass corresponds to the calculated mass of 351 Da.

[0279] 3.2 Synthesis of H-D-Leu-OGp(Boc)₂

[0280] 1 mmol Z-D-Leu-OH (Bachem, Bubendorf, Switzerland), 0.9 eq. TBTU and 0.9 eq. HO-Gp(Boc)₂ were dissolved in 10 ml DMF. After addition of 2 eq. DIPEA the solution was stirred for 2 hours. After evaporating the solvent the raw product was purified with flash chromatography using DCM. Pure fractions of Z-D-Leu-OGp(Boc)₂ were combined and the solvent was evaporated.

[0281] Z-D-Leu-OGp(Boc)₂ was dissolved in 10 ml MeOH and flushed with argon. Hydrolytic cleavage of the N-terminal Z-group was achieved by the addition of Pd/C catalyst and H₂ in 2 hours. After filtrating off H-D-Leu-OGp(Boc)₂ MeOH was evaporated under reduced pressure. Analytics was performed using reversed phase HPLC and mass spectrometry. The correct mass of 465 Da for the product was found and is in correspondence the calculated mass.

[0282] 3.3 Synthesis of All-D-Peptide AcMLTLIQGKKIVNHLRSRLAFEYNGQLIKILSKNIVAVGSL-OGp (1)

[0283] 0.10 mmol TentaGel-R-Trityl resin (Rapp Polymere, Tubingen, Deutschland) was loaded with Fmoc-D-Ser(tBu)-OH (Bachem, Bubendorf, Switzerland) as described by Barlos et al. (Barlos et al., 1989). Therefore 0.10 mmol resin was incubated twice for 30 min with 0.6 mmol thionylchloride and subsequently washed with DCM. Following this the resin was incubated 90 min with 0.6 mmol Fmoc-D-Ser(tBu)-OH, 2.4 mmol DIPEA in 6 ml DCM. Afterwards the resin was blocked three times for 10 min using a solution of 10% MeOH (v/v), 10% DIPEA (v/v) in DCM and washed with DCM. Automated synthesis was done using an ABI 433 (Applied Biosystems, Foster City, USA) with the FASTmoc protocol. 10 eq. amino acid were activated using 9 eq. HATU and 20 eq. DIPEA in NMP. Coupling time was 45 min and Fmoc-deprotection was performed three times for 7 min with 20% (v/v) piperidine (Sigma-Aldrich Chemie GmbH, Schnelldorf, Deutschland) in NMP.

[0284] The cleavage of the fully protected peptide acid was achieved by incubating the peptidyl resin twice in 10 ml 30% (v/v) HFIP in DCM for 2 hours. After filtering off the peptide the solvent was evaporated and the residue precipitated using ice cold diethyl ether. The precipitated peptide was isolated and dried.

[0285] 0.01 mmol fully protected peptide, 4 eq. PyBOP and 5 eq. H-D-Leu-OGp(Boc)₂ were dissolved in 6 ml NMP. After addition of 10 eq. DIPEA the mixture was stirred for 4 hours. Following this the solvent was reduced evaporated and the residue precipitated by ice cold diethyl ether. The precipitated peptide ester was dried and subsequently protection groups were cleaved off using 2.5% EDT, 2.5% water, 2.5% TIS in TFA for 2 hours. Following the evaporation of TFA the peptide was precipitated with ice cold diethyl ether. Reversed phase HPLC purification of the peptide ester was performed on a C18 column (Phenomenex, Aschaffenburg, Germany) using an ACN/water gradient. Fractions that contain product were combined and freeze dried.

[0286] The final product was characterised by HPLC/UPLC (FIG. 2A) and mass spectrometry (FIG. 2B). The measured mass for the product of 4654.7 Da is in correspondence to the theoretical mass of 4652.7 Da.

[0287] 3.4 Synthesis of all-D-peptide H-RREEKLNDVDLLIIVPEKKL LKHVLPNIRIKGLSFSVKA-SMe (2)

[0288] 0.10 mmol TentaGel-R—NH₂ resin (Rapp Polymere, Tubingen, Deutschland) was loaded with Fmoc-D-Ala-OH using 5 eq. amino acid, eq. 4.9 eq. HATU and 10 eq. DIPEA for 45 min in 6 ml NMP. Subsequently the resin was washed with THF. Conversion to Fmoc-d-Ala-Ψ[CS-NH]-R-TentaGel was achieved by incubation with 4 eq. Lawesson reagent in THF at 80° C. for 2 hours. Following this the resin was washed with NMP. Subsequently the so prepared resin was used in automated peptide synthesis as described previously (see Example 1.3).

[0289] Following this the corresponding thioester was generated by incubation with methyl iodide in DMF overnight according to Sharma et al. (Sharma et al., 2011). After filtering of the resin the peptide thioester containing solvent was evaporated and the residue precipitated using ice cold diethyl ether. The cleavage of side chain protection groups was performed with 2.5% EDT, 2.5% water, 2.5% TIS in TFA for 2 hours. Following the evaporation of TFA the peptide was precipitated with ice cold diethyl ether. Reversed phase HPLC purification of the peptide thioester was performed on a C18 column (Phenomenex, Aschaffenburg, Germany) using an ACN/water gradient. Fractions that contain product were combined and freeze dried.

[0290] The final product was characterised by HPLC/UPLC (FIG. 3A) and mass spectrometry (FIG. 3B). The experimentally determined mass for the product (4683.8 Da) is in accordance with the theoretical value of 4681.7 Da

[0291] 3.5 Synthesis of all-D-peptide H-CGERKCVLFIEWEKKTYQLDLFTALAEEKPYAIFHFTGPVSYLIRIRAALKKKNYKL NQYGLFKNQTLVPLKITTEKELIKELGFTYRIPKKRL-OH (3)

[0292] 0.10 mmol TentaGel-R-PHB resin (Rapp Polymere, Tubingen, Deutschland) was loaded with Fmoc-D-Leu-OH using 6 eq. amino acid, 6 eq. MSNT and 4.5 eq MeIm in DCM. Automated synthesis was done using an ABI 433 with the FASTmoc protocol. 10 eq. amino acid were activated using 9 eq. HATU and 20 eq. DIPEA in NMP. Coupling time was 45 min and Fmoc-deprotection was performed three times for 7 mM with 20% (v/v) piperidine in NMP. Double coupling steps were performed after 42 amino acids. Cleavage of the N-terminal Fmoc-protected peptide was achieved using 2.5% EDT, 2.5% water, 2.5% TIS in TFA for 2 hours. Following the evaporation of TFA the peptide was precipitated with ice cold diethyl ether. Reversed phase HPLC purification of the crude N-terminal protected peptide was performed on a C18 column using an ACN/water gradient. Product containing fractions were combined and freeze dried. The Fmoc-protected peptide was subsequently dissolved and stirred in 20% piperine in DMF for cleaving off the N-terminal Fmoc-group. After 20 min the solvent was evaporated and the residue precipitated using ice cold diethyl ether. Subsequently the precipitated crude peptide was purified using reversed phase HPLC with C18 column with an ACN/water gradient. Product containing fractions were combined and freeze dried.

[0293] The final product was characterised by HPLC/UPLC (FIG. 4A) and mass spectrometry (FIG. 4B). The determined mass of the product (11184.3 Da) corresponds to the theoretical mass of 11178.2 Da.

[0294] 3.6 Synthesis of All-D-Peptide Ac-MLTLIQGKKIVNHLRSRLAFEYNGQLIKILSKNIVAVGSLRREEKMLNDVDLLIIVP EKKLLKHVLPNIRIKGLSFSVKA-SMe (4) by Protease-Catalyzed Ligation of Peptide 1 with Peptide 2

[0295] Peptide 1 was solved 0.2 mM and peptide 2 was solved 0.6 mM in sodium-phosphate buffer (100 mM, pH 8.5, with 100 mM NaCl) containing 2% Triton X100 (Sigma Aldrich Chemie GmbH, Schnelldorf, Germany). After addition of 20 μM Clostripain (Endoprotease Arg-C, Worthington Biochemical Corporation, Lakewood, N.J., USA) the reaction mixture was shaken overnight at 37° C. The precipitated peptides were centrifuged, solved in H₂O/ACN/Formic Acid 60/40/0.5 and purified by reversed-phase HPLC using a RP-18-column (Phenomenex, Aschaffenburg, Germany) with a gradient of ACN in water of 30% to 60% within 30 min. Product containing fractions were combined and freeze dried.

[0296] The final peptide was analyzed by reversed phase UPLC (FIG. 5A) and ESI-mass spectrometry (FIG. 5B). The theoretical molecular weight (Mₜₕₑₒᵣ=9199.3 Da) corresponds the observed molecular weight (M_{obs}=9199.4 Da).

[0297] 3.7 Synthesis of All-D Polymerase X Variant V80A by Native Chemical Ligation of Peptide 4 with Peptide 3

[0298] Both peptides 3 and 4 were solved 0.2 M in TRIS-buffer (pH 8.6) containing 6 M GuanidinHCl (Sigma Aldrich Chemie GmbH, Schnelldorf, Germany), 200 mM mercaptophenyl-acetic acid (Sigma Aldrich Chemie GmbH, Schnelldorf, Germany) and 5 mm Tris(2-carboxyethyl)phosphine hydrochloride (Sigma Aldrich Chemie GmbH, Schnelldorf, Germany). The reaction mixture was shaking 72 h by room temperature. Afterwards the mixture was purified by reversed phase HPLC using a RP-8-column (Phenomenex, Aschaffenburg, Germany) with a gradient of ACN in water of 30% to 60% within 30 min. Fractions which contained the ligation product were pooled and dried. The dry powder was solved in water and purified by size exclusion chromatography using a SEC3000-column (Phenomenex, Aschaffenburg, Germany) with sodium-buffer phosphate (Sigma Aldrich Chemie GmbH, Schnelldorf, Germany) (50 mM, pH 6.8, 0.5% SDS) as eluent. Product containing fractions were combined and freeze dried.

[0299] The final product was analyzed by SDS-PAGE (FIG. 6A) and ESI-mass spectrometry (FIG. 6B). A clear band was found in lane 7 between 14.4 kDa and 21.5 kDa indicating the pure full length polymerase. The theoretical molecular weight (Mₜₕₑₒᵣ=20342 Da) corresponds the observed molecular weight (M_{obs}=20361 Da) as shown by ESI-MS.

### EXAMPLE 4

### Activity Confirmation of Synthetic Polymerase X Variant Consisting of D-Amino Acids

[0300] The dry all-D polymerase X variant V80A according to example 3 was dissolved in 6 M guanidinium hydrochloride and refolded at 4° C. by step-wise dialysis in commercially available dialysis devices (Pierce/PerBio, Bonn, Germany) with 3,500 molecular weight cut-off. Final buffer was 50 mM sodium phosphate, 500 mM sodium chloride, pH 7.5. Protein concentration was estimated by sodium dodecyl sulphate (SDS) polyacrylamide gel electrophoresis (PAGE) on pre-cast gels (Invitrogen, Karlsruhe, Germany) using a standard series of known protein concentrations followed by SYPRO-RED staining (Invitrogen, Karlsruhe, Germany) and densiometric band analysis on a BioRad Fx scanner instrument.

[0301] The activity assay for the all-D polymerase X variant V80A was done with two different substrate types:

[0302] 4.1 Activity Assays on Substrates with 1-Nucleotide Gap

[0303] Substrates were made by annealing a 33-mer lower strand DNA oligonucleotide with two 17-mer upper strand DNA oligonucleotides resulting in a gap of 1 nucleotide in the upper strand. Oligonucleotides were synthesized in L-configuration. Before annealing, 17-mer upper strand oligonucleotide MJ_1_58_MD was radioactively labeled at its 5′-end with ³²P by a standard kinase reaction employing Gamma-³²P-Adenosine-Triphosphate (Gamma-³²P-ATP) and T4 polynucleotide kinase. To facilitate the kinase reaction of the L-oligonucleotide MJ_1_58_MD, two D-configurated guanosine bases were added at the 5′ end during oligonucleotide synthesis. Annealing was done in 10 mM Tris-HCl, 5 mM MgCl₂, pH 8.0 by heating 10 mM at 65° C. and slowly cooling down. Unincorporated gamma-32P-ATP was removed by purification over NAP-columns (GE healthcare, Freiburg, Germany). The complexes contained either A, C, G or T at the template position within the gap. For the setup of the substrate complexes see FIG. 7.

[0304] In the activity assay, synthetic all-D polymerase X variant V80A was combined with L-configurated 1-gap substrate complexes. As a negative control, each substrate was also incubated without all-D polymerase X variant V80A and L-desoxy-nucleotide-triphosphates (dNTP's). Depending on the template base within the 1-gap complex only the corresponding L-dNTP was added during the assay. A typical 6 μl assay contained 50 nM substrate complex, 1.7 ng/μl all-D polymerase X variant V80A, 8 μM of one L-dNTP and buffer (50 mM Tris-HCl, 10 mM MgCl₂, 4% glycerol, 0.1 mg/ml bovine serum albumin (BSA), pH 7.5). L-dNTP's were purchased as custom synthesis from Rasayan, Inc. (Encinitas, Calif., USA). The incubation time was 30 minutes at 37° C. The whole assay volume was mixed with sample buffer/dye, loaded on a denaturing sequencing gel a separated for 4 hours. The gel was exposed to Kodak K screen overnight at −80° C. and read out using BioRad Fx phosphoimager system.

[0305] As can be seen from FIG. 8, all-D polymerase X variant V80A gives elongation products on L-DNA 1-gap substrates, thus confirming the activity of the synthetic protein. Noteworthy, only all-D polymerase X variant V80A combined with L-substrate and L-dNTP's gave any elongation product. Also, only samples containing the L-dNTP corresponding to their template base yielded elongation product. That means on the A-complex the dTTP nucleotide, on the C-complex the dGTP nucleotide, on the G-complex the dCTP nucleotide and on the T-complex the dATP nucleotide had to be present to yield any elongation product.

[0306] 4.2 Activity Assay on Substrates with 6-Nucleotide Gap

[0307] Substrates were made by annealing a 33-mer lower strand DNA oligonucleotide with two 17-mer and 12-mer upper strand DNA oligonucleotides resulting in a gap of 6 nucleotides in the upper strand. Oligonucleotides were synthesized in L-configuration. Before annealing, 17-mer upper strand oligonucleotide MJ_1_58_MD (L-configuration) was radioactively labeled at its 5′-end with ³²P by a standard kinase reaction employing Gamma-³²P-Adenosine-Triphosphate (ATP) and T4 polynucleotide kinase. To facilitate the kinase reaction of the L-oligonucleotide MJ_1_58_MD, two D-configurated guanosine bases were added at the 5′ end during oligonucleotide synthesis. Annealing was done in 10 mM Tris-HCl, 5 mM MgCl₂, pH 8.0 by heating 10 min at 65° C. and slowly cooling down. Unincorporated Gamma-³²P-ATP was removed by purification over NAP-columns (GE healthcare, Freiburg, Germany). For the setup of the substrate complexes see FIG. 9A.

[0308] In the activity assay synthetic all-D polymerase X variant V80A was combined with L-configurated 6-gap substrate complex. As a negative control, the substrate was also incubated without all-D polymerase X variant V80A and desoxy-nucleotide-triphosphates (L-dNTP's). A typical 6 μl assay contained 50 nM substrate complex, up to 1.3 ng/μl all-D polymerase X variant V80A, 8 μM each of the L-dNTP's and buffer (50 mM Tris-HCl, 10 mM MgCl₂, 4% glycerol, 0.1 mg/ml bovine serum albumin (BSA), pH 7.5). L-dNTP's were purchased as custom synthesis by Rasayan, Inc. (Encinitas, Calif., USA). A typical incubation time was 30 minutes at 37° C., but depending on activity of the batch longer incubations were used. The whole assay volume was mixed with sample buffer/dye, loaded on a denaturing sequencing gel a separated for 4 hours. The gel was exposed to Kodak K screen overnight at −80° C. and read out using BioRad Fx phosphoimager system.

[0309] As can be seen from FIG. 9B, synthetic all-D polymerase X variant V80A gives N+6 elongation products on L-DNA 6-gap substrates, thus confirming the activity of the synthetic protein. However, synthesis of N+6 elongation product was less evident than N+1 elongation product on the same 6-gap complex. Also increased incubation time was necessary to fill the 6-gap. Noteworthy, only all-D polymerase X variant V80A combined with L-substrate plus L-dNTP's gave any elongation product.

### EXAMPLE 5

### DNA Synthesis by Polymerase X and Variants of Polymerase X

[0310] Polymerase X from African Swine Fever Virus (abbr. ASFV) is described in literature (Oliveros, 1997) as a highly distributive enzyme with gap-repair function. As shown in example 2 all-L-polymerase X and variants thereof has been shown to catalyze the incorporation of only very few nucleotides after each initiation on gapped substrates. Here we disclose a method which allows using all-L-polymerase X and variants for synthesizing longer DNA and show complete polymerization of a 83-mer strand.

[0311] 5.1 Primer-Template Substrate

[0312] A primer-template complex has been used to test activity of all-L-polymerase X and variants thereof. The same complex has also been used to test variants V80G and V80A of the all-L-polymerase X.

[0313] List of D-oligonucleotides for the primer-template complex without gap:

| | Length, | Config- | |
|---|---|---|---|
| Name | nt | uration | Sequence (5′→3′) |
| MJ_1_33_DD | 19 | D | Atto532-GGAGCTCAGACTGGCACGC |
| MJ_1_1_DD | 83 | D | GTGGAACCGACAACTTGTGCTGCGTCCAGCATAAGAAAGGAG |
| | | | CTCCCTCAGAAGAAGCTGCGCAGCGTGCCAGTCTGAGCTCC |

[0314] The substrate was made by annealing a template strand DNA oligonucleotide consisting of 83 nucleotides (MJ_1_1_DD) with a DNA oligonucleotide consisting of 19 nucleotides. Oligonucleotides were synthesized at NOXXON. The oligonucleotide MJ_1_33_DD carries the fluorescent dye Atto-532 (AttoTec, Siegen, Germany). Annealing was done in 10 mM Tris-HCl, 5 mM MgCl2, pH 8.0 by heating 10 mM at 65° C. and slowly cooling down. The primer-template complex is depicted in FIG. 10A.

[0315] 5.2 Reaction at Constant Temperature

[0316] In the activity assay, all-L-polymerase X or variants V80G or V80A of all-L-polymerase X were combined with D-configurated primer-template complex. A typical 6 μl assay contained 50 nM substrate complex, up to 1.3 ng/μl all-L-polymerase X or variants V80G or V80A of all-L-polymerase X, 8 μM each of the D-dNTP's and buffer (50 mM Tris-HCl, 10 mM MgCl₂, 4% glycerol, 0.1 mg/ml bovine serum albumin (BSA), pH 7.5). D-dNTP's were purchased from Rovalab (Teltow, Germany). Incubation time was 30 minutes at 37° C. for Pol-X samples. As a negative control, the substrate was also incubated without any all-L-polymerase X or variants V80G or V80A of all-L-polymerase X and without desoxy-nucleotide-triphosphates (D-dNTP's). A positive control was conducted with Taq polymerase (Invitrogen, Karlsruhe, Germany) used at final concentration of 0.083 U/μl in Taq buffer supplied by manufacturer. Taq samples were incubated 30 minutes at 60° C. The whole assay volume was mixed with sample buffer/dye, and separated on a denaturing gel. The gel was read out using BioRad Fx phosphoimager system.

[0317] All-L-polymerase X or variants V80G or V80A all-L-polymerase X were active, but were not able to complete the polymerization of the full 83-mer template. The Taq polymerase positive control shows complete polymerization of the 83-mer template, see FIG. 10B.

[0318] 5.3 Reaction Under Thermal Cycling Conditions

[0319] Under the assumption that all-L-polymerase X after initiation catalyzes the incorporation of only one nucleotide and then pauses while staying on the DNA substrate, we performed repeated heat pulses (50° C., 2 minutes) in order to allow all-L-polymerase X for dissociation from and reassociation to the template. Using this repeated thermal cycling procedure we were able to perform full polymerization of the 83-mer with all-L-polymerase X. Reactions and controls were set-up as described above for constant temperature, except that the temperature profile for all-L-polymerase X samples was run as follows:

[0320] 5 to 25 cycles of (30 minutes at 20° C./2 minutes at 50° C.)

[0321] then a final step of 30 minutes at 20° C.

[0322] It was observed that from 15 cycles onwards all-L-polymerase X was able to polymerize the full 83-mer template strand, similar to the positive control, see FIG. 10C.

### EXAMPLE 6

### Primer Elongation with a Synthetic Polymerase X Variant Consisting of D-Amino Acids

[0323] The method disclosed in this example uses L-configurated substrates for testing all-D configurated polymerase.

[0324] 6.1 Primer-Template Substrate

[0325] List of L-oligonucleotides for the primer-template complex without gap:

| | Length, | Config- | |
|---|---|---|---|
| Name | nt | uration | Sequence (5′→3′) |
| MJ_1_109_MD | 21 | first | D(GG)-L(GGAGCTCAGACTGGCACGC) |
| | | two = D, | |
| | | others L | |
| MJ_1_105_LD | 83 | L | GTGGAACCGACAACTTGTGCTGCGTCCAGCATAAGAAAGGAG |
| | | | CTCCCTCAGAAGAAGCTGCGCAGCGTGCCAGTCTGAGCTCC |

[0326] The substrate is made by annealing a 83-mer lower strand DNA oligonucleotide with the 19-mer upper strand DNA oligonucleotide. Oligonucleotides are synthesized at NOXXON's in-house facility in L-configuration. Before annealing, 21-mer upper strand oligonucleotide MJ_1_109_MD is radioactively labeled at its 5′-end with ³²P by a standard kinase reaction employing Gamma-³²P-Adenosine-Triphosphate (ATP) and T4 polynucleotide kinase. To facilitate the kinase reaction of the L-oligonucleotide MJ_1_109_MD, two D-configurated guanosine bases are added at the 5′ end during oligonucleotide synthesis. Annealing is done in 10 mM Tris-HCl, 5 mM MgCl₂, pH 8.0 by heating 10 min at 65° C. and slowly cooling down. Unincorporated Gamma-³²P-ATP is removed by purification over NAP-columns (GE healthcare, Freiburg, Germany).

[0327] 6.2 Reaction at constant temperature

[0328] In the activity assay, synthetic all-D polymerase X variant V80A is combined with L-configurated primer-template complex. A typical 6 μl assay contains 50 nM substrate complex, up to 1.3 ng/μl all-D polymerase X variant, 8 μM each of the L-dNTP's and buffer (50 mM Tris-HCl, 10 mM MgCl₂, 4% glycerol, 0.1 mg/ml bovine serum albumin (BSA), pH 7.5). L-dNTP's were purchased from Rasayan, Inc. (Encinitas, Calif., USA). Incubation time is at least 30 minutes at 37° C. As a negative control, the substrate is also incubated without any polymerase and without desoxy-nucleotide-triphosphates (L-dNTP's). The whole assay volume is mixed with sample buffer/dye, and separated on a denaturing gel. The gel is read out using BioRad Fx phosphoimager system.

[0329] The synthetic all-D polymerase X variant V80A is active under this condition, but—similar to the all-L polymerase X counterpart—is not able to polymerize the full 83 nucleotide template strand.

[0330] 6.3 Reaction Under Thermal Cycling Conditions

[0331] Analog to example 5 a repeated thermal cycling procedure is used to allow for full polymerization of the 83-mer L-substrate with All-D Polymerase X variant V80A. Reactions and controls are set-up as described above for constant temperature, except that the temperature profile was run as follows:

[0332] 5 to 25 cycles of (30 minutes at 20° C./2 minutes at 50° C.)

[0333] then a final step of 30 minutes at 20° C.

[0334] It is observed that all-D polymerase X variant V80A—similar to the all-L polymerase X counterpart—is able to polymerize the full 83-mer template strand when using thermal cycle elongation.

### EXAMPLE 7

### Recombinant Expression and Purification of Polymerase Dpo4 and Variants of Polymerase Dpo4, all Consisting of L-Amino Acids

[0335] The polymerase Dpo4 was originally discovered in Sulfolobus Solfataricus (abbr. Sso) (Boudsocq, 2001). The wild-type gene has an open reading frame (abbr. ORF) of 1,059 base pairs including start codon and stop codon. The encoded protein has a length of 352 amino acids. This example describes how polymerase Dpo4 and variants of polymerase Dpo4 have been expressed in E. coli and been purified using Strep-Tag.

[0336] 7.1 Expression Constructs

[0337] Since the codon usage of Sso differs from E. coli, an E. coli-codon-optimized synthetic gene for wild-type Sso polymerase Dpo4 was purchased from GeneArt AG (Regensburg, Germany). The synthetic gene sequence was provided in pENTRY-IBA10 vector (originator company: IBA GmbH, Göttingen, Germany). The codon-optimized open reading frame including start codon, but not including stop codon had the following sequence:

ATGATTGTGCTGTTTGTGGATTTTGATTATTTTTATGCCCAGGTGGAAGA
AGTTCTGAATCCGAGCCTGAAAGGTAAACCGGTTGTTGTTTGTGTTTTTA
GCGGTCGCTTTGAAGATAGCGGTGCAGTTGCAACCGCCAATTATGAAGCC
CGTAAATTTGGTGTTAAAGCCGGTATTCCGATTGTTGAAGCCAAAAAAAT
TCTGCCGAATGCAGTTTATCTGCCGATGCGCAAAGAAGTTTATCAGCAGG
TTAGCAGCCGTATTATGAATCTGCTGCGCGAATATAGCGAAAAAATTGAA
ATTGCCAGCATTGATGAAGCCTATCTGGATATTAGCGATAAAGTGCGCGA
TTATCGCGAAGCATATAATCTGGGCCTGGAAATTAAAAATAAAATCCTGG
AAAAAGAAAAAATTACCGTGACCGTGGGCATTAGCAAAAATAAAGTGTTT
GCCAAAATTGCAGCAGATATGGCAAAACCGAATGGCATTAAAGTGATTGA
TGATGAAGAAGTGAAACGTCTGATTCGCGAACTGGATATTGCAGATGTTC
CGGGTATTGGCAATATTACCGCAGAAAAACTGAAAAAACTGGGCATTAAT
AAACTGGTTGATACCCTGAGCATTGAATTTGATAAACTGAAAGGCATGAT
TGGTGAAGCGAAAGCCAAATATCTGATTAGCCTGGCACGTGATGAATATA
ATGAACCGATTCGTACCCGTGTTCGTAAAAGCATTGGTCGTATTGTGACC
ATGAAACGCAATAGCCGTAATCTGGAAGAAATTAAACCGTACCTGTTTCG
TGCAATTGAAGAAAGCTATTATAAACTGGATAAACGCATTCCGAAAGCCA
TTCATGTTGTTGCAGTTACCGAAGATCTGGATATTGTTAGCCGTGGTCGT
ACCTTTCCGCATGGTATTAGCAAAGAAACCGCCTATAGCGAAAGCGTTAA
ACTGCTGCAGAAAATCCTGGAAGAAGATGAACGTAAAATTCGTCGTATTG
GTGTGCGCTTTAGCAAATTTATTGAAGCCATTGGCCTGGATAAATTTTTT
GATACC.

[0338] In order to obtain the expression construct for polymerase Dpo4, also referred to as all-L-polymerase Dpo4, the gene was subcloned from pENTRY-IBA10 into the pASG-IBA5 vector (IBA GmbH, Göttingen, Germany), using a commercially available StarGate cloning kit (IBA GmbH). Subcloning added a Strep-Tag II to the N-terminus and a stop codon to the C-terminus, and brought the gene under control of the tet promoter. The construct was named pMJ343 and was used for expression of all-L-polymerase Dpo4 in E. coli. The all-L-polymerase Dpo4 expressed from pMJ343 had the following sequence of 368 amino acids:

MASAWSHPQFEKSGMIVLFVDFDYFYAQVEEVLNPSLKGKPVVVCVFSGR
FEDSGAVATANYEARKFGVKAGIPIVEAKKILPNAVYLPMRKEVYQQVSS
RIMNLLREYSEKIEIASIDEAYLDISDKVRDYREAYNLGLEIKNKILEKE
KITVTVGISKNKVFAKIAADMAKPNGIKVIDDEEVKRLIRELDIADVPGI
GNITAEKLKKLGINKLVDTLSIEFDKLKGMIGEAKAKYLISLARDEYNEP
IRTRVRKSIGRIVTMKRNSRNLEEIKPYLFRAIEESYYKLDKRIPKAIHV
VAVTEDLDIVSRGRTFPHGISKETAYSESVKLLQKILEEDERKIRRIGVR
FSKFIEAIGLDKFFDTGS.

[0339] The initial 14 amino acids represented the Strep-Tag II including a few spacer amino acids, the final 2 amino acids represented spacer amino acids, and the middle 352 amino acid part was identical to the polymerase Dpo4 sequence as found in Sso.

[0340] Expression constructs for variants of all-L-polymerase Dpo4 were made using the commercially available QuikChange kit (Stratagene GmbH, Waldbronn, Germany) according to manufacturer's protocol. Plasmid pMJ343 served as template to make pMJ361, pMJ362, pMJ363, pMJ502, pMJ503 and pMJ504. Plasmid pMJ343 also served as template to make pMJ365 in two steps. Then pMJ365 served as template to make pMJ508, pMJ509, pJA95, pJA96, pJA100, pJA103 and pJA104. Then pMJ509 served as template to make pMJ511. Oligonucleotides needed for QuikChange were either synthesized at NOXXON (QC_38_up, QC_38_low, QC_39_up, QC_39_low, QC_40_up, QC_40_low, QC_41_up, QC_41_low, QC_dpo4_M76G_sense, QC_dpo4_M76G_antisense, QC_dpo4_M76A_sense, QC_dpo4_M76A_antisense, QC_dpo4 J67C_sense, QC_dpo4 J67C_antisense, QC_dpo4_S86G_sense, QC_dpo4_S86G_antisense) or purchased from Purimex (Grebenstein, Germany) (QC_28_up, QC_28_low, QC_29_up, QC_29_low, QC_30_up, QC_30_low).

[0341] The following variant expression constructs were made and used for expression of the variants of all-L-polymerase Dpo4 in E. coli

| | | oligonucleotides |
|---|---|---|
| variant | construct | used for QuikChange mutagenesis procedure |
| A155C | pMJ361 | QC_28_up. |
| | | (5′CAAAAATAAAGTGTTTGCCAAAATTGCATGCGATATGGCAAAACCG |
| | | AATGGCATTAAAG 3′) |
| | | QC_28_low |
| | | (5′CTTTAATGCCATTCGGTTTTGCCATATCGCATGCAATTTTGGCAAA |
| | | CACTTTATTTTTG 3′) |
| V203C | pMJ362 | QC_29_up |
| | | (5′TGAAAAAACTGGGCATTAATAAACTGTGTGATACCCTGAGCATTGA |
| | | ATTTG 3′) |
| | | QC_29_low |
| | | (5′-CAAATTCAATGCTCAGGGTATCACACAGTTTATTAATGCCCAGTTT |
| | | TTTCA 3′) |
| C31S | pMJ363 | QC_30_up |
| | | (5′TGAAAGGTAAACCGGTTGTTGTTTCTGTTTTTAGCGGTC 3′) |
| | | QC_30_low |
| | | (5′GACCGCTAAAAACAGAAACAACAACCGGTTTACCTTTCA 3′) |
| A155C | pMJ365 | QC_28_up |
| + | | QC_28_low |
| V203C | | QC_29_up |
| | | QC_29_low |
| S85C | pMJ502 | QC_38_up |
| | | (5′ATGCGCAAAGAAGTTTATCAGCAGGTTTGTAGCCGTATTATGAATC |
| | | 3′) |
| | | QC_38_low |
| | | (5′GATTCATAATACGGCTACAAACCTGCTGATAAACTTCTTTGCGCAT- |
| | | 3′) |
| S86C | pMJ503 | QC_39_up |
| | | (5′AAGTTTATCAGCAGGTTAGCTGTCGTATTATGAATCTGCTGCG |
| | | 3′) |
| | | QC_39_low |
| | | (5′CGCAGCAGATTCATAATACGACAGCTAACCTGCTGATAAACTT |
| | | 3′) |
| S96C | pMJ504 | QC_40_up |
| | | (5′ATTATGAATCTGCTGCGCGAATATTGTGAAAAAATTGAAATTGCCA |
| | | GCATT 3′) |
| | | QC_40_low |
| | | (5′AATGCTGGCAATTTCAATTTTTTCACAATATTCGCGCAGCAGATTC |
| | | ATAAT 3′) |
| A71C | pMJ508 | QC_41_up |
| + | | (5′AGCCAAAAAAATTCTGCCGAATTGTGTTTATCTGCCGATGCGCAAA |
| A155C | | G 3′) |
| + | | QC_41_low |
| V203C | | (5′CTTTGCGCATCGGCAGATAAACACAATTCGGCAGAATTTTTTTGGCT |
| | | 3′) |
| S86C + | pMJ509 | QC_39_up |
| A155C | | QC_39_low |
| + | | |
| V203C | | |
| C31S + | pMJ511 | QC_30_up |
| S86C + | | QC_30_low |
| A155C | | |
| + | | |
| V203C | | |
| M76G | pJA95 | QC_dpo4_M76G_sense |
| + | | (5′CGAATGCAGTTTATCTGCCGGGGCGCAAAGAAGTTTATCAGC 3′) |
| A155C | | QC_dpo4_M76G_antisense |
| + | | (5′GCTGATAAACTTCTTTGCGCCCCGGCAGATAAACTGCATTCG 3′) |
| V203C | | |
| M76A | pJA96 | QC_dpo4_M76A_sense |
| + | | (5′-CGAATGCAGTTTATCTGCCGGCGCGCAAAGAAGTTTATCAGC 3′) |
| A155C | | QC_dpo4_M76A_antisense |
| + | | (5 ′ GCTGATAAACTTCTTTGCGCGCCGGCAGATAAACTGCATTCG 3′) |
| V203C | | |
| I67C + | pJA100 | QC_dpo4_I67C_sense |
| A155C | | (5′GGTATTCCGATTGTTGAAGCCAAAAAATGTCTGCCGAATGCAG |
| + | | 3′) |
| V203C | | QC_dpo4_I67C_antisense |
| | | (5′CTGCATTCGGCAGACATTTTTTGGCTTCAACAATCGGAATACC |
| | | 3′) |
| S86G + | pJA103 | QC_dpo4_S86G_sense |
| A155C | | (5′GTTTATCAGCAGGTTAGCGGCCGTATTATGAATCTGC 3′) |
| + | | QC_dpo4_S86G_antisense |
| V203C | | (5′GCAGATTCATAATACGGCCGCTAACCTGCTGATAAAC 3′) |
| S96C + | pJA104 | QC_40_up |
| A155C | | QC_40_low |
| + | | |
| V203C | | |

[0342] 7.2 Protein Expression in E. coli

[0343] All-L-polymerase Dpo4 was expressed in E. coli using expression construct pMJ343. Mutant variants of all-L-polymerase Dpo4 were expressed from pMJ361, pMJ362, pMJ363, pMJ365, pMJ502, pMJ503, pMJ504, pMJ508, pMJ509, pMJ511, pJA95, pJA96, pJA100, pJA103 or pJA104. For expression, the appropriate expression construct was transformed in E. coli strain ‘NEB express’ (New England Biolabs, Frankfurt am Main, Germany) using ‘Transformation and Storage Solution’ (Epicentre/Biozym, Hessisch Oldendorf, Germany) and maintained with the antibiotic Ampicillin. Expression was done in medium ‘EnBase Flo’ or ‘EnPresso’ (BioSilta, Oulu, Finland) for 48 h at 30° C. using 200 ng/ml Anhydrotetracyclin (IBA GmbH, Göttingen, Germany) as inducer. Cells were harvested by centrifugation and either stored at −80° C. or immediately processed.

[0344] 7.3 Protein Purification

[0345] Fresh or frozen E. coli cells were resuspended on ice in ‘Buffer W’ (100 mM Tris-HCl, pH 8.0, 150 mM NaCl, 1 mM EDTA) and lysed using a ‘French Press’ (G. Heinemann, Schwäbisch Gmünd, Germany) cell disrupter. Purification was done at 4° C. on an ‘ÄKTA Express’ system equipped with 5 ml StrepTrap HP columns (GE healthcare, Freiburg, Germany). Step elution was done with Buffer W including 2.5 mM Desthiobiotin (IBA GmbH, Göttingen, Germany). Fractions were analyzed using SDS-PAGE (Invitrogen, Karlsruhe, Germany), pooled and, if required, further purified with anion-ion-exchange chromatography on an ‘ÄKTA purifier’ system equipped with ‘Q HP’ columns (GE healthcare, Freiburg, Germany). Protein identity was confirmed by LC-MS mass spectometry and correct fractions were pooled, concentrated and re-buffered using VivaSpin 15R concentration devices with 10,000 molecular weight cut-off (MWCO) (VivaSciences/Sartorius Stedim Biotech, Göttingen, Germany). Purified protein was stored at −20° C. in a buffer consisting of 100 mM KCl, 10 mM Tris-HCl pH 7.4, 0.1 mM EDTA, 1 mM DTT, 50% glycerol. Protein concentrations were estimated by gel-densiometry using a bovine serum albumin (abbr. BSA) standard on SDS-PAGE and staining with SYPRO Red (Invitrogen, Karlsruhe, Germany).

### EXAMPLE 8

### Production of a Synthetic Polymerase Dpo4 Consisting of Two Fragments

[0346] All-L polymerase Dpo4 has a length of 352 amino acids. In order to chemically produce the all-L polymerase Dpo4, such a synthetic all-L polymerase Dpo4 had to be assembled from shorter fragments that can be synthesized by solid-phase peptide synthesis, wherein said shorter fragments had to be ligated by a peptide ligation method such as the native chemical ligation. This example describes how ligation fragments 1-154, 155-352, 155-202 and 203-352 of Dpo4 have been expressed in E. coli, purified and ligated to each other by native chemical ligation to yield the synthetic all-L-polymerase Dpo4.

[0347] 8.1 Expression Constructs

[0348] As disclosed in example 7 the gene for all-L-polymerase Dpo4 has been obtained as a synthetic gene construct from a commercial source (GeneArt, Regensburg, Germany). All fragments of this example were cloned based on that codon-optimized sequence. The following expression constructs for fragments 1-154, 155-352, 155-202 and 203-352 of the all-L-polymerase Dpo4 variant A155C were made:

| Fragment of Dpo4 (amino acid range) | expression construct |
|---|---|
| 1-154-thioester | pMJ370 |
| 155-352 | pMJ384 |
| contained A155C mutation | |
| 203-352 | pMJ385 |
| contained A155C mutation | |
| 155-202 thioester | pMJ388 |

[0349] 8.1.1 Fragment 1-154-Thioester of all-L-Polymerase Dpo4 Variant A155C—Expression Construct pMJ370

[0350] This construct contains the fragment 1-154 of the all-L-polymerase Dpo4 variant A155C followed by an Mxe GyrA intein, which was used to produce the thioester, and a chitin-binding domain (CBD). The construct was assembled from two PCR products. PCR product 1 was made using pMJ343 as a template and primers MJ_1_90_DD (5′-Phosphate-AGCGGCTCTTCGATGATTGTGCTGTTTGTGGATTTT-3′) and MJ_1_91_DD (5′-Phosphate-AGCGGCTCTTCGGCATGCAATTTTGGCAAACACTTT-3′) to amplify the fragment 1-154 of all-L-polymerase Dpo4 variant A155C. PCR product 2 was made using pTWIN1 (New England Biolabs, Frankfurt am Main, Germany) as a template and primers MJ_1_72_DD (5′-Phosphate-AGCGGCTCTTCGTGCATCACGGGAGAT-3′) and MJ_1_73_DD (5′-Phosphate-AGCGGCTCTTCGCCCTTGAAGCTGCCACAAGGCAGGAACGTT-3′) to amplify the Mxe Gyr A intein and the CBD. Primers MJ_1_90_DD and MJ_1_91_DD were from Purimex (Grebenstein, Germany) while primers MJ_1_72_DD and MJ_1_73_DD were from IBA GmbH (Göttingen, Germany). The two PCR products were gel-purified on a flash-gel system (LONZA, Basel, Switzerland) and cloned together in pENTRY-IBA20 using the StarGate Mutagenesis ENTRY cloning kit (IBA GmbH, Göttingen, Germany) to result in pMJ366. Subcloning from pMJ366 in pASG-IBAwt1 (IBA GmbH, Göttingen, Germany) using the StarGate Transfer cloning kit (IBA GmbH, Göttingen, Germany) yielded pMJ370. The construct pMJ370 encodes the fragment 1-154-thioester of all-L-polymerase Dpo4 variant A155C with the following protein sequence of 154 amino acids length (after intein cleavage/thioester production):

MIVLFVDFDYFYAQVEEVLNPSLKGKPVVVCVFSGRFEDSGAVATANYEA
RKFGVKAGIPIVEAKKILPNAVYLPMRKEVYQQVSSRIMNLLREYSEKIE
IASIDEAYLDISDKVRDYREAYNLGLEIKNKILEKEKITVTVGISKNKVF
AKIA-thioester.

[0351] 8.1.2 Fragment 155-352 of all-L-Polymerase Dpo4 Variant A155C—Expression Construct pMJ384

[0352] This construct contains a ‘Profinity eXact’ tag followed by the fragment 155-352 of all-L-polymerase Dpo4 variant A155C. The ‘Profinity eXact’ tag was used for purification and proteolytic cleavage. The construct was assembled from two PCR products. PCR product 1 was made using pPAL7 (Bio-Rad, München, Germany) as a template and primers MJ_1_99_DD (5′-Phosphate-AGCGGCTCTTCGATGGGAGGGAAATCAAACGGGGAA-3′) and MJ_1_100_DD (5′-Phosphate-AGCGGCTCTTCGGCACAAAGCTTTGAAGAGCTTGTC-3′) to amplify the ‘Profinity eXact’ tag. PCR product 2 was made using pMJ361 as a template and primers MJ_1_96_DD (5′-Phosphate-AGCGGCTCTTCGTGCGATATGGCAAAACCGAATGGCATTAAA-3′) and MJ_1_97_DD (5′-Phosphate-AGCGGCTCTTCGCCCTTAGGTATCAAAAAATTTATCCAGG-3′) to amplify the dpo4 fragment 155-352 containing the A155C mutation. Primers MJ_1_96_DD, MJ_1_97_DD, MJ_1_99_DD and MJ_1_100_DD were all from Purimex (Grebenstein, Germany). The 2 PCR products were gel-purified on a flash-gel system (LONZA, Basel, Switzerland) and cloned together in pENTRY-IBA20 using the StarGate Mutagenesis ENTRY cloning kit (IBA GmbH, Göttingen, Germany) to result in pMJ382. Subcloning from pMJ382 in pASG-IBA5 (IBA GmbH, Göttingen, Germany) using the StarGate Transfer cloning kit (IBA GmbH, Göttingen, Germany) yielded pMJ384. The construct pMJ384 encodes the fragment 155-352 of all-L-polymerase Dpo4 containing mutation A155C with the following protein sequence of 198 amino acids length (after proteolytic cleavage):

[symbol]

DMAKPNGIKVIDDEEVKRLIRELDIADVPGIGNITAEKLKKLGINKL
VDTLSIEFDKLKGMIGEAKAKYLISLARDEYNEPIRTRVRKSIGRIVTM
KRNSRNLEEIKPYLFRAIEESYYKLDKRIPKAIHVVAVTEDLDIVSRGR
TFPHGISKETAYSESVKLLQKILEEDERKIRRIGVRFSKFIEAIGLDKF
FDT.

[0353] 8.1.3 Fragment 203-352 of all-L-Polymerase Dpo4 Variant A155C—Expression Construct pMJ385

[0354] This construct contains a ‘Profinity eXact’ tag followed by the dpo4 fragment 203-352 containing mutation V203C. The ‘Profinity eXact’ tag was used for purification and proteolytic cleavage. The construct was assembled from two PCR products. PCR product 1 was made using pPAL7 (Bio-Rad, München, Germany) as a template and primers MJ_1_99_DD (5′-Phosphate-AGCGGCTCTTCGATGGGAGGGAAATCAAACGGGGAA-3′) and MJ_1_100_DD (5′-Phosphate-AGCGGCTCTTCGGCACAAAGCTTTGAAGAGCTTGTC-3′) to amplify the ‘Profinity eXact’ tag. PCR product 2 was made using pMJ362 as a template and primers MJ_1_98_DD (5′-Phosphate-AGCGGCTCTTCGTGTGATACCCTGAGCATTGAATTT-3′) and MJ_1_97_DD (5′-Phosphate-AGCGGCTCTTCGCCCTTAGGTATCAAAAAATTTATCCAGG-3′) to amplify the dpo4 fragment 203-352 containing the V203C mutation. Primers MJ_1_97_DD, MJ_1_98_DD, MJ_1_99_DD and MJ_1_100_DD were all from Purimex (Grebenstein, Germany). The 2 PCR products were gel-purified on a flash-gel system (LONZA, Basel, Switzerland) and cloned together in pENTRY-IBA20 using the StarGate Mutagenesis ENTRY cloning kit (IBA GmbH, Göttingen, Germany) to result in pMJ383. Subcloning from pMJ383 in pASG-IBA5 (IBA GmbH, Göttingen, Germany) using the StarGate Transfer cloning kit (IBA GmbH, Göttingen, Germany) yielded pMJ385. The construct pMJ385 encodes the dpo4 fragment 203-352 V203C with the following protein sequence of 150 amino acids length (after proteolytic cleavage):

[symbol]

DTLSIEFDKLKGMIGEAKAKYLISLARDEYNEPIRTRVRKSIGRIVT
MKRNSRNLEEIKPYLFRAIEESYYKLDKRIPKAIHVVAVTEDLDIVSRG
RTFPHGISKETAYSESVKLLQKILEEDERKIRRIGVRFSKFIEAIGLDK
FFDT

[0355] 8.1.4 Fragment 155-202 of all-L-Polymerase Dpo4—Expression Construct pMJ388

[0356] This construct contains the dpo4 fragment 155-202 followed by an Mxe GyrA intein, which was used to produce the thioester, and a chitin-binding domain (CBD). The construct was assembled from two PCR products. PCR product 1 was made using pMJ343 as a template and primers MJ_1_101_DD (5′-Phosphate-AGCGGCTCTTCGATGGCAGATATGGCAAAACCGAAT-3′) and MJ_1_102_DD (5′-Phosphate-AGCGGCTCTTCGGCACAGTTTATTAATGCCCAGTTT-3′) to amplify the dpo4 155-202 fragment. PCR product 2 was made using pTWIN1 (New England Biolabs, Frankfurt am Main, Germany) as a template and primers MJ_1_72_DD (5′-Phosphate-AGCGGCTCTTCGTGCATCACGGGAGAT-3′) and MJ_1_73_DD (5′-Phosphate-AGCGGCTCTTCGCCCTTGAAGCTGCCACAAGGCAGGAACGTT-3′) to amplify the Mxe Gyr A intein and the CBD. Primers MJ_1_101_DD and MJ_1_102_DD were from Purimex (Grebenstein, Germany) while primers MJ_1_72_DD and MJ_1_73_DD were from IBA GmbH (Göttingen, Germany). The 2 PCR products were gel-purified on a flash-gel system (LONZA, Basel, Switzerland) and cloned together in pENTRY-IBA20 using the StarGate Mutagenesis ENTRY cloning kit (IBA GmbH, Göttingen, Germany) to result in pMJ386. Subcloning from pMJ386 in pASG-IBAwt1 (IBA GmbH, Göttingen, Germany) using the StarGate Transfer cloning kit (IBA GmbH, Göttingen, Germany) yielded pMJ388. The construct pMJ388 encodes the dpo4 fragment 155-202 with the following protein sequence of 48 amino acids length (after E. coli mediated cleavage of the initial Methionine and after intein cleavage/thioester production):

ADMAKPNGIKVIDDEEVKRLIRELDIADVPGIGNITAEKLKKLGINKL-
thioester

[0357] 8.2 Protein Expression in E. coli

[0358] For expression, the appropriate expression construct was transformed in E. coli strain ‘NEB express’ (New England Biolabs, Frankfurt am Main, Germany) using ‘Transformation and Storage Solution’ (Epicentre/Biozym, Hessisch Oldendorf, Germany) and maintained with the antibiotic Ampicillin. Expression was done in medium ‘EnBase Flo’ or ‘EnPresso’ (BioSilta, Oulu, Finland) at ambient temperature, using 200 ng/ml Anhydrotetracyclin (IBA GmbH, Göttingen, Germany) as inducer during an overnight period. Cells were harvested by centrifugation and either stored at −80° C. or immediately processed.

[0359] 8.3 Purification and Generation of a Thioester from Constructs pMJ370 and pMJ388 with Mxe Gyr A Intein

[0360] Fresh or frozen E. coli cells were resuspended on ice in ‘column buffer’ (20 mM HEPES, pH 8.5, 500 mM NaCl) and lysed using a ‘French Press’ (G. Heinemann, Schwäbisch Gmünd, Germany) cell disrupter. Purification was done at 4° C. on an ‘ÄKTA Express’ system (GE healthcare, Freiburg, Germany) equipped with columns containing chitin binding beads (New Englands Biolabs, Frankfurt am Main, Germany). After applying cell lysate and washing with column buffer until baseline, the columns were incubated 20 hours at 4° C. with 50 mM 2-mercaptoethane sulfonate (abbr. MESNA) in column buffer to induce intein-mediated protein cleavage and thioester formation. Cleaved protein carrying thioester was washed out of the column with column buffer, concentrated and subjected to gelfiltration using BioGel P60 medium material (BioRad, München, Germany) in a buffer consisting of 5 mM Bis-Tris, pH 6.5, 250 mM NaCl. Protein concentrations were estimated by gel-densiometry using a bovine serum albumin (BSA) standard on SDS-PAGE and staining with SYPRO Red (Invitrogen, Karlsruhe, Germany). Protein identity and the presence of the thioester were confirmed by LC-MS mass spectrometry.

[0361] 8.4 Purification and Proteolytic Cleavage from Construct pMJ384 with ‘Profinity eXact’ Tag

[0362] Purification of fragment 155-352 of the all-L-polymerase Dpo4 variant A155C from pMJ384 was done as follows: Fresh or frozen E. coli cells were resuspended on ice in ‘Buffer W’ (100 mM Tris-HCl, pH 8.0, 150 mM NaCl, 1 mM EDTA) and lysed using a ‘French Press’ (G. Heinemann, Schwäbisch Gmünd, Germany) cell disrupter. Purification was done at 4° C. on an ‘ÄKTA Express’ system equipped with 5 ml StrepTrap HP columns (GE healthcare, Freiburg, Germany). Step elution was done with Buffer W including 2.5 mM Desthiobiotin (IBA GmbH, Göttingen, Germany). Eluted protein was subjected to buffer exchange in ‘Profinity eXact elution buffer’ (0.1 M Na-phosphate, pH 7.2, 0.1 M NaF) using a HiPrep 26/10 desalting column (GE healthcare, Freiburg, Germany) and then slowly pumped through a Profinity eXact column. The sample was concentrated, supplemented with Tris(2-carboxyethyl)phosphine) (TCEP) to 1 mM final concentration and applied to gelfiltration using a HiLoad 16/60 Superdex 75 prep grade column (GE healthcare, Freiburg, Germany) developed in a buffer consisting of 5 mM Bis-Tris, pH 6.5, 250 mM NaCl. Protein was concentrated and stored at −80° C. Protein concentrations were estimated by gel-densiometry using a bovine serum albumin (BSA) standard on SDS-PAGE and staining with SYPRO Red (Invitrogen, Karlsruhe, Germany). Protein identity was confirmed by LC-MS mass spectrometry.

[0363] 8.5 Purification and Proteolytic Cleavage from Construct pMJ385 with ‘Profinity eXact’ Tag

[0364] Purification of dpo4 fragment 203-352 V203C from pMJ385 was done as follows: Inclusion bodies were prepared and denatured as described in the ‘i-FOLD Protein refolding system’ manual (Novagen/Merck-Millipore, Darmstadt, Germany). Solubilized protein was subjected to buffer exchange into ‘Buffer W’ (100 mM Tris-HCl, pH 8.0, 150 mM NaCl, 1 mM EDTA) using Sephadex G-25 fine material (GE healthcare, Freiburg, Germany) and purified at 4° C. on an ‘ÄKTA Express’ system equipped with StrepTrap HP columns (GE healthcare, Freiburg, Germany). Step elution was done with Buffer W including 2.5 mM Desthiobiotin (IBA GmbH, Göttingen, Germany). Eluted protein solution was supplemented with NaF to a final concentration of 0.1 M and Tris(2-carboxyethyl)phosphine) (TCEP) to a final concentration of 1 mM and then slowly pumped through a Profinity eXact column. Flowthrough was diluted 1:3 with deionized water and pH adjusted to 7.2 using HCl. The sample was further purified by cation-exchange-chromatography using HiTrap SP HP columns (GE healthcare, Freiburg, Germany) equilibrated in ‘Buffer A’ (50 mM Na-Phosphate, pH 7.2, 1 mM 2-mercaptoethanol). Step elution was done using 17%, 25% and 100% of ‘Buffer B’ (50 mM Na-Phosphate, pH 7.2, 1 M NaCl, 1 mM 2-mercaptoethanol). Fractions were pooled, concentrated and applied to gelfiltration using a HiLoad 16/60 Superdex 75 prep grade column (GE healthcare, Freiburg, Germany) developed in deionized water. Protein was shock frozen in liquid nitrogen and lyophilized. Protein concentrations were estimated by gel-densiometry using a bovine serum albumin (BSA) standard on SDS-PAGE and staining with SYPRO Red (Invitrogen, Karlsruhe, Germany). Protein identity was confirmed by LC-MS mass spectrometry.

[0365] 8.6 Synthesis of Synthetic all-L-Polymerase Dpo4 Variant A155C by Native Chemical Ligation of the Fragments 1-154-Thioester and 155-352

[0366] The fragments 1-154-thioester and 155-352 of all-L-polymerase Dpo4 variant A155C were solved 50 μM in TRIS-buffer (pH 8.6) containing 2% Triton X100, 1% thiophenol and 5 mM tris(2-carboxyethyl)phosphine hydrochloride. The reaction mixture was shaken 72 h by room temperature. Afterwards the ligation success was analyzed by SDS-PAGE (FIG. 11A) and LC-ESI-mass spectrometry (RP18-column, gradient of ACN with 0.1% TFA in water with 0.1% TFA 5-95% in 20 min, FIG. 11B). A clear band was found in lane around 41 kDa indicating the full length polymerase. The theoretical molecular weight (Mₜₕₑₒᵣ=40223 Da) corresponds the observed molecular weight (M_{ob}, =40265 Da) as shown by ESI-MS.

[0367] 8.7 Synthesis of Fragment 155-352 by Native Chemical Ligation of the Fragments 155-202-Thioester and 203-352

[0368] The fragments 155-202-thioester and 203-352 V203C of all-L-polymerase Dpo4 were solved 0.2 M in TRIS-buffer (pH 8.6) containing 2% SDS, 1% thiophenol and 5 mM tris(2-carboxyethyl)phosphine hydrochloride. The reaction mixture was shaken 72 h by room temperature. Analysis of the ligation success was performed by SDS-PAGE (FIG. 20A) and LC-ESI-mass spectrometry (RP18-column, gradient of ACN with 0.1% TFA in water with 0.1% TFA 5-95% in 20 min, FIG. 20B). A clear band was found in lane 7 around 21.5 kDa indicating the ligation product. The theoretical molecular weight (Mₜₕₑₒᵣ=22749 Da) corresponds the observed molecular weight (M_{obs}=22769 Da) as shown by ESI-MS.

### EXAMPLE 9

### Recombinant Expression and Purification of Truncated Forms of Polymerase Dpo4, all Consisting of L-Amino Acids

[0369] The polymerase Dpo4 was originally discovered in Sulfolobus Solfataricus (abbr. Sso) (Boudsocq, 2001). The wild-type gene has an open reading frame (abbr. ORF) of 1,059 base pairs including start codon and stop codon. The encoded protein has a length of 352 amino acids. This example describes how truncated forms of polymerase Dpo4 have been expressed in E. coli and been purified using Strep-Tag.

[0370] 9.1 Expression Constructs

[0371] Since the codon usage of Sso differs from E. coli, an E. coli-codon-optimized synthetic gene for wild-type Sso polymerase Dpo4 was purchased from GeneArt AG (Regensburg, Germany). Also, truncated versions with 3, 6 or 9 amino acids deleted from C-terminus were custom made by GeneArt. The synthetic gene sequences were provided in pASK-IBA5plus vector (originator company: IBA GmbH, Göttingen, Germany) which adds a Strep-Tag to the N-terminus. The truncation form of dpo4 with 3 amino acids deleted at the C-terminus was the longest variant expressed from this series of plasmids, named clone 3.C11 (variant Δ3) and had the following sequence of 368 amino acids (sequence shown from N- to C-terminus):

MASWSHPQFEKGAETAVPNSIVLFVDFDYFYAQVEEVLNPSLKGKPVVVC
VFSGRFEDSGAVATANYEARKFGVKAGIPIVEAKKILPNAVYLPMRKEVY
QQVSSRIMNLLREYSEKIEIASIDEAYLDISDKVRDYREAYNLGLEIKNK
ILEKEKITVTVGISKNKVFAKIAADMAKPNGIKVIDDEEVKRLIRELDIA
DVPGIGNITAEKLKKLGINKLVDTLSIEFDKLKGMIGEAKAKYLISLARD
EYNEPIRTRVRKSIGRIVTMKRNSRNLEEIKPYLFRAIEESYYKLDKRIP
KAIHVVAVTEDLDIVSRGRTFPHGISKETAYSESVKLLQKILEEDERKIR
RIGVRFSKFIEAIGLDKF.

[0372] The initial 20 amino acids represented the Strep-Tag II including a few spacer amino acids, the following sequence then represents Sulfolobus solfataricus Dpo4 amino acids 2-349. Other truncation forms described in this example have the same sequence at the N-terminus, but less amino acids at the C-terminus. For example, clone 9.C3 (variant Δ6) had 6 amino acids deleted and clone 2.F12 (variant Δ9) had 9 amino acids deleted from the C-terminus. Expression constructs for further truncations forms of Dpo4 were made using the commercially available QuikChange kit (Stratagene GmbH, Waldbronn, Germany) according to manufacturer's protocol. Clone 2.F12 (dpo4 with 9 amino acids C-terminally deleted in pASK-IBA5plus) served as template to make pCK58 and pCK59. Oligonucleotides needed for QuikChange were at NOXXON.

[0373] The following expression constructs were made and used for expression of the truncated forms of polymerase Dpo4 in E. coli

| variant | construct | comment |
|---|---|---|
| Δ3 | clone | from GeneArt |
| | 3.C11 | |
| Δ6 | clone | from GeneArt |
| | 9.C3 | |
| Δ9 | clone | from GeneArt |
| | 2.F12 | |
| Δ12 | pCK58 | made using the following QuikChange |
| | | oligonucleotides |
| | | QC_35_up |
| | | (5′TATTGGTGTGCGCTTTAGCAAATTTTAATAAGGTACCCGGG 3′) |
| | | QC_35_low |
| | | (5′CCCGGGTACCTTATTAAAATTTGCTAAAGCGCACACCAATA 3′) |
| Δ15 | pCK59 | QC_36_up |
| | | (5′GTATTGGTGTGCGCTTTTAATAAGGTACCCGGGG 3′) |
| | | QC_36__low |
| | | (5′CCCCGGGTACCTTATTAAAAGCGCACACCAATAC 3′) |

[0374] 9.2 Protein Expression in E. coli

[0375] Truncated forms Δ3, Δ6, Δ9, Δ12 or Δ15 of Dpo4 were expressed in E. coli using expression construct based on pASK-IB5plus. For expression, the appropriate expression construct was transformed in E. coli strain ‘NEB express’ (New England Biolabs, Frankfurt am Main, Germany) using ‘Transformation and Storage Solution’ (Epicentre/Biozym, Hessisch Oldendorf, Germany) and maintained with the antibiotic Ampicillin. Expression was done in medium ‘EnBase Flo’ or ‘EnPresso’ (BioSilta, Oulu, Finland) for 48 h at 30° C. using 200 ng/ml Anhydrotetracyclin (IBA GmbH, Göttingen, Germany) as inducer. Cells were harvested by centrifugation and either stored at −80° C. or immediately processed.

[0376] 9.3 Protein Purification

[0377] Fresh or frozen E. coli cells were resuspended on ice in ‘Buffer W’ (100 mM Tris-HCl, pH 8.0, 150 mM NaCl, 1 mM EDTA) and lysed using a ‘French Press’ (G. Heinemann, Schwäbisch Gmünd, Germany) cell disrupter. Purification was done at 4° C. on an ‘ÄKTA Express’ system equipped with 5 ml StrepTrap HP columns (GE healthcare, Freiburg, Germany). Step elution was done with Buffer W including 2.5 mM Desthiobiotin (IBA GmbH, Göttingen, Germany). Fractions were pooled and buffer-exchanged in 50 mM Na-phosphate, pH 7.2 using a HiPrep_26/10 column (GE healthcare, Freiburg, Germany). Then proteins samples were applied to 5 ml cation exchange columns HiTrap_SP_HP (GE healthcare, Freiburg, Germany) and eluted with a gradient up to 1 M NaCl in 50 mM Na-phosphate pH 7.2. Eluted peak fractions were collected, pooled and buffer exchanged in 20 mM Tris-HCl pH 7.4, 200 mM KCl, 0.2 mM EDTA. All important fractions were analyzed using SDS-PAGE (Invitrogen, Karlsruhe, Germany. Protein identity was confirmed by LC-MS mass spectometry. The final samples were concentrated using VivaSpin 15R concentration devices with 10,000 molecular weight cut-off (MWCO) (VivaSciences/Sartorius Stedim Biotech, Göttingen, Germany) and supplemented with one volume glycerol and DTT, so that the storage buffer consisted of 10 mM Tris-HCl pH 7.4, 100 mM KCl, 0.1 mM EDTA, 1 mM DTT, 50% glycerol. Purified protein was stored at −20° C. Protein concentrations were estimated by gel-densiometry using a bovine serum albumin (abbr. BSA) standard on SDS-PAGE and staining with SYPRO Red (Invitrogen, Karlsruhe, Germany).

### EXAMPLE 10

### Activity Confirmation of Polymerase Dpo4 and Variants of Polymerase Dpo4 Consisting of L-Amino Acids

[0378] This example describes a PCR activity test for all-L-polymerase Dpo4 and variants of all-L-polymerase Dpo4 according to example 7, for the synthetic all-L-polymerase Dpo4 according to example 8 and for truncated forms of Dpo4 according to example 9.

[0379] 10.1 Templates for PCR Activity Assay

[0380] Template for the PCR reaction is a 83-mer single-stranded D-DNA oligonucleotide (MJ_1_1_DD) from which, in the first thermal cycle, the opposite strand is made. Thereafter both strands serve as template for exponential amplification. Template DNA oligonucleotide and DNA primers are synthesized at NOXXON in D-configuration.

[0381] List of oligonucleotides for the PCR activity assay:

| | Length, | |
|---|---|---|
| Name | nt | Sequence (5′→3′) |
| MJ_1_1_DD | 83 | GTGGAACCGACAACTTGTGCTGCGTCCAGCA |
| | | TAAGAAAGGAGCTCCCTCAGAAGAAGCTGCG |
| | | CAGCGTGCCAGTCTGAGCTCC |
| DE4.40T7 | 38 | TCTAATACGACTCACTATAGGAGCTCAGACT |
| | | GGCACGC |
| DE4.40R | 20 | GTGGAACCGACAACTTGTGC |

[0382] 10.2 PCR Reactions

[0383] 15 μl PCR reactions contained 0.2 mM each of the four D-dNTP's, 10 nM 83-mer ssDNA (MJ_1_1_DD) template, 1 μM of forward and reverse primer, 1× ThermoPol buffer (Invitrogen, 20 mM Tris-HCl, 10 mM KCl, 10 mM (NH₄)₂SO₄, 2 mM MgSO₄, 0.1% Triton X-100, pH 8.8@25° C.) and at least 0.67 ng/μl all-L-polymerase Dpo4 or a variant of all-L-polymerase Dpo4 or the synthetic all-L-polymerase Dpo4. The forward primer is DE4.40T7, the reverse primer is DE4.40R, yielding a PCR product of 102 base pairs length. The D-dNTP's were purchased from Rovalab (Teltow, Germany). Negative controls were conducted by omitting all-L-polymerase Dpo4 or a variant of all-L-polymerase Dpo4 or the synthetic all-L-polymerase Dpo4. Positive controls were conducted using commercially available all-L-dpo4 (New England Biolabs, Frankfurt am Main, Germany).

[0384] The thermal cycling program consisted of 1 cycle (85° C., 3 min) then at least 7 cycles (85° C., 30 sec/56° C., 1 min/60° C., 4 min) then hold at 4° C. 4 μl aliquots of the PCR reactions were mixed with sample loading buffer and analyzed on TBE-PAGE or on agarose gels (LONZA, Cologne, Germany). A DNA standard ladder containing, among others, a 100 bp band was applied on the gel.

[0385] 10.3 Activity Confirmation

[0386] All-L-polymerase Dpo4, the variants A155C, V203C, C31S, A155C/V203C, S85C, S86C, S96C, A71C/A155C/V203C, S86C/A155C/V203C, C31S/S86C/A155C/V203C, M76G/A155C/V203C, M76A/A155C/V203C, 167C/A155C/V203C, S86G/A155C/V203C and S96C/A155C/V203C of all-L-polymerase Dpo4, and the C-terminally truncated forms Δ3, Δ6, Δ9, Δ12 and Δ15 of Dpo4, and the synthetic all-L-polymerase Dpo4 were tested. All tested polymerases were able to amplify the template strand in the PCR reaction. FIG. 12A shows the analysis of PCR reactions performed with the variants A155C, V203C, C31S, A155C/V203C of all-L-polymerase Dpo4, which showed a band in the range of about 100 bp as compared with the DNA standard ladder. Expected PCR product size was 102 base pairs. Said band does not appear in the negative controls, where polymerase is omitted. Also said 102 bp band migrates higher than the 83-mer template. FIG. 12B shows the analysis of PCR reactions performed with the recombinant all-L-polymerase dpo4 and with the synthetic all-L-polymerase dpo4 which was made by ligation of fragments. The gel showed bands in the range of about 100 bp as compared with the DNA standard ladder. Expected PCR product size was 102 base pairs. Said band is very weak in the negative controls, where polymerase is omitted. Recombinant all-L-polymerase dpo4 and synthetic all-L-polymerase dpo4 show comparable activity. FIG. 12C shows the analysis of PCR reactions performed with the recombinant all-L-polymerase dpo4 and with the variants A71C/A155C/V203C, S86C/A155C/V203C and C31S/S86C/A155C/V203C. The gel showed bands in the range of about 100 bp as compared with the DNA standard ladder. Expected PCR product size was 102 base pairs. FIG. 12D shows the analysis of PCR reactions performed with the recombinant all-L-polymerase dpo4 and with the variants M76G/A155C/V203C and M76A/A155C/V203C. The gel showed bands in the range of about 100 bp as compared with the DNA standard ladder. Expected PCR product size was 102 base pairs. FIG. 12E shows the analysis of PCR reactions performed with the variants 167C/A155C/V203C, S86G/A155C/V203C and S96C/A155C/V203C. The gel showed bands in the range of about 100 bp as compared with the DNA standard ladder. Expected PCR product size was 102 base pairs. FIG. 12F shows the analysis of PCR reactions performed with the C-terminally truncated forms Δ3, Δ6, Δ9, Δ12 and Δ15 of Dpo4. The gel showed bands in the range of about 100 bp as compared with the DNA standard ladder. Expected PCR product size was 102 base pairs.

### EXAMPLE 11

### Synthesis of a Variant of Polymerase Dpo4 Consisting of D-Amino Acids

[0387] Within the example the synthesis of the all-D polymerase Dpo variant A155C/V203C is described. The amino acid sequence of the all-D polymerase Dpo variant A155C/V203C is

Ac-MIVLFVDFDYFYAQVEEVLNPSLKGKPVVVCVFSGRFEDSGAVATAN
YEARKFGVKAGIPIVEAKKILPNAVYLPMRKEVYQQVSSRIMNLLREYSE
KIEIASIDEAYLDISDKVRDYREAYNLGLEIKNKILEKEKITVTVGISKN
KVFAKIACDMAKPNGIKVIDDEEVKRLIRELDIADVPGIGNITAEKLKKL
GINKLCDTLSIEFDKLKGMIGEAKAKYLISLARDEYNEPIRTRVRKSIGR
IVTMKRNSRNLEEIKPYLFRAIEESYYKLDKRIPKAIHVVAVTEDLDIVS
RGRTFPHGISKETAYSESVKLLQKILEEDERKIRRIGVRFSKFIEAIGLD
KFFDT-OH.

[0388] All amino acids used are protected according to the Solid-phase peptide synthesis Fmoc/tBu-strategy requirements (Eric Atherton et al, 1981). All amino acids used are D-amino acids (Bachem, Bubendorf, Switzerland).

[0389] 11.1 Synthesis of H-D-Met-OGp(Boc)₂

[0390] 1 mmol Z-D-Met-OH, 0.9 eq. TBTU and 0.9 mmol HO-Gp(Boc)₂ were dissolved in 10 ml DMF. After addition of 2 eq. DIPEA the solution was stirred for 2 hours. After evaporating the solvent the raw product was purified with flash chromatography using DCM. Pure fractions of Z-D-Met-OGp(Boc)₂ were combined and the solvent was evaporated.

[0391] Z-D-Met-OGp(Boc)₂ was dissolved in 10 ml MeOH and flushed with argon. Hydrolytic cleavage of the N-terminal Z-group was achieved by the addition of Pd/C catalyst and H₂ in 2 hours. After filtrating off H-D-Met-OGp(Boc)₂ MeOH was evaporated under reduced pressure. Analytics was performed using reversed phase HPLC and mass spectrometry. The calculated mass of 482 Da is in accordance to the determined mass of 483 Da.

[0392] 11.2 Synthesis of Fully Protected All-D-Peptide H-

(1)
RTFPHGISKETAYSESVKLLQKILEEDERIURRIGVRFSKFIEAIGLDKF
FDT-NH₂

[0393] 0.1 mmol Fmoc-Sieber rink amide NovaSynTG resin was loaded after Fmoc-deprotection with Fmoc-D-Thr(tBu)-OH using 5 eq. amino acid, eq. 4.9 eq. HATU and 10 eq. DIPEA for 45 min in 6 ml NMP.

[0394] Automated synthesis was done using an ABI 433 with the FASTmoc protocol. 10 eq. amino acid were activated using 9 eq. HATU and 20 eq. DIPEA in NMP. Coupling time was 45 min and Fmoc-deprotection was performed three times for 7 min with 20% (v/v) piperidine in NMP. Double coupling was performed after coupling of 42 amino acids.

[0395] The cleavage of the fully protected peptide acid was achieved by incubating the peptidyl resin twice in 10 ml 1% (v/v) TFA in DCM for 2 hours. After filtering off the peptide the solvent was evaporated and the residue precipitated using ice cold diethyl ether. The precipitated peptide was isolated and dried.

[0396] The final product was characterised by HPLC and mass spectrometry (FIG. 13). The calculated mass for the product (6244 Da) corresponds to the measured mass (6249 Da).

[0397] 11.3 Synthesis of Fully Protected All-D-Peptide Boc-

(2)
VDTLSIEFDKLKGMIGEAKAKYLISLARDEYNEPIRTRVRKSIGRIVTMK
RNSRNLEEIKPYLFRAIEESYYKLDKRIPKAIHVVAVTEDLDIVSRG-OH

[0398] 0.10 mmol TentaGel-R-Trityl resin was loaded with Fmoc-D-Gly-OH as described in Barlos et al. (Barlos et al., 1989). Therefore 0.10 mmol resin was incubated twice for 30 min with 0.6 mmol thionylchloride and subsequently washed with DCM. Following this the resin was incubated 90 min with 0.6 mmol Fmoc-Gly-OH, 2.4 mmol DIPEA in 6 ml DCM. Afterwards the resin was blocked three times for 10 min using a solution of 10% MeOH (v/v), 10% DIPEA (v/v) in DCM and washed with DCM. Automated synthesis was done using an ABI 433 with the FASTmoc protocol. 10 eq. amino acid were activated using 9 eq. HATU and 20 eq. DIPEA in NMP. Coupling time was 45 min and Fmoc-deprotection was performed three times for 7 min with 20% (v/v) piperidine in NMP. Double coupling was performed after coupling of 39 amino acids.

[0399] The cleavage of the fully protected peptide acid was achieved by incubating the peptidyl resin twice in 10 ml 30% (v/v) HFIP in DCM for 2 hours. After filtering off the peptide the solvent was evaporated and the residue precipitated using ice cold diethyl ether. The precipitated peptide was isolated and dried. The final product was characterised by HPLC and mass spectrometry (FIG. 14). The experimentally determined mass of the product (11289 Da) was in accordance to the theoretical value (11286 Da).

[0400] 11.4 Synthesis of All-D-Peptide

(3)
H-VDTLSIEFDKLKGMIGEAKAKYLISLARDEYNEPIRTRVRKSIGRIVT
MKRNSRNLEEIKPYLFRAIEESYYKLDKRIPKAIHVVAVTEDLDIVSRGR
TFPHGISKETAYSESVKLLQKILEEDERKIRRIGVRFSKFIEAIGLDKFF
DT-NH₂

by fragment condensation of peptide 1 with peptide 2.

[0401] 5 μmole (2) and 1 eq. (1) were dissolved in 25% (v/v) TFE in DCM. After addition of 5 eq. PyBOP and 10 eq. DIPEA the mixture was stirred overnight. After evaporating the solvent the peptide was precipitated using ice cold diethyl ether and filtered off.

[0402] The cleavage of the side chain protection groups of the peptide was performed with 2.5% EDT, 2.5% water, 2.5% TIS in TFA for 2 hours. Following the evaporation of TFA the peptide was precipitated with ice cold diethyl ether. Reversed phase HPLC purification of the N-terminal Fmoc-protected peptide was performed on a C18 column using an ACN/water gradient. Fractions that contain product were combined and freeze dried.

[0403] The final product was characterised by HPLC and mass spectrometry (FIG. 15). The experimentally determined mass (17531 Da) corresponds to the theoretical molecular mass (17512 Da).

[0404] 11.5 Synthesis of All-D-Peptide

(4)
Z-CDMAKPNGIKVIDDEEVKRLIRELDIADVPGIGNITAEKLKKLGINKL-
benzyl-thioester

[0405] 0.10 mmol TentaGel-R-Trityl resin was loaded with Fmoc-D-Leu-OH as described in Barlos et al. (Barlos et al., 1989). Therefore 0.10 mmol resin was incubated twice for 30 min with 0.6 mmol thionylchloride and subsequently washed with DCM. Following this the resin was incubated 90 min with 0.6 mmol Fmoc-D-Leu-OH, 2.4 mmol DIPEA in 6 ml DCM. Afterwards the resin was blocked three times for 10 min using a solution of 10% MeOH (v/v), 10% DIPEA (v/v) in DCM and washed with DCM. Automated synthesis was done using an ABI 433 with the FASTmoc protocol. 10 eq. amino acid were activated using 9 eq. HATU and 20 eq. DIPEA in NMP. Coupling time was 45 min and Fmoc-deprotection was performed three times for 7 min with 20% (v/v) piperidine in NMP.

[0406] The cleavage of the fully protected peptide acid was achieved by incubating the peptidyl resin twice in 10 ml 30% (v/v) HFIP in DCM for 2 hours. After filtering off the peptide the solvent was evaporated and the residue precipitated using ice cold diethyl ether. The precipitated peptide was isolated and dried.

[0407] The N-terminal Z- and completely side chain protected peptide 4 was solved 1 mM in DMF. After addition of 5 eq. PyBOP, 10 eq. DIPEA and 30 eq. benzyl mercaptan the mixture was stirred for 4 h. Then the DMF was evaporated, the peptide was precipitated and washed with ice-cold diethyl ether. The side chain protecting groups were removed by treatment with 2.5% EDT, 2.5% water, 2.5% TIS in TFA for 2 hours. After the evaporation of TFA the peptide was precipitated and washed with ice cold diethyl ether. The peptide-benzyl-thioester was then purified by reversed-phase HPLC and analyzed by reversed-phase HPLC (FIG. 16A) and ESI-MS (FIG. 16B). The theoretical molecular weight (Mₜₕₑₒᵣ=5527 Da) corresponds the observed molecular weight (M_{obs}=5533 Da) as shown by ESI-MS.

[0408] 11.6 Synthesis of all-D-peptide

(7)
H-RKEVYQQVSSRIMNLLREYSEKIEIASIDEAYLDISDKVRDYREAYNL
GLEIKNKILEKEKITVTVGISKNKVFAKIA-SMe

[0409] 0.10 mmol TentaGel-R-NH₂ resin was loaded with Fmoc-D-Ala-OH using 5 eq. amino acid, eq. 4.9 eq. HATU and 10 eq. DIPEA for 45 min in 6 ml NMP. Subsequently the resin was washed with THF. Conversion to Fmoc-D-Ala-Ψ[CS-NH]-R-TentaGel was achieved by incubation with 4 eq. Lawesson reagent in THF at 80° C. for 2 hours. Following this the resin was washed with NMP. Subsequently the so prepared resin was used in automated peptide synthesis as described previously (ABI 433, FASTmoc protocol, 10 eq. amino acid were activated using 9 eq. HATU and 20 eq. DIPEA in NMP; coupling time was 45 min and Fmoc-deprotection was performed three times for 7 min with 20% (v/v) piperidine in NMP). Double coupling steps were performed after 44 coupled amino acids.

[0410] Following this the corresponding thioester was generated by incubation with methyl iodide in DMF overnight according to Sharma et al. (Sharma et al, 2011). After filtering of the resin the peptide thioester containing solvent was evaporated and the residue precipitated using ice cold diethyl ether. The cleavage of side chain protection groups was performed with 2.5% EDT, 2.5% water, 2.5% TIS in TFA for 2 hours. Following the evaporation of TFA the peptide was precipitated with ice cold diethyl ether. Reversed phase HPLC purification of the peptide thioester was performed on a C18 column using an ACN/water gradient. Fractions that contain product were combined and freeze dried.

[0411] The final product was characterised by HPLC (FIG. 17A) and mass spectrometry (FIG. 17B). The molecular mass of the product determined by mass spectrometry (9155 Da) was in accordance to the calculated mass (9150 Da).

[0412] 11.7 Synthesis of

(6)
Ac-MIVLFVDFDYFYAQVEEVLNPSLKGKPVVVCVFSGRFEDSGAVATAN
YEARKFGVKAGIPIVEAKKILPNAVYLPM-OGp

[0413] 0.10 mmol TentaGel-R-Trityl resin was loaded with Fmoc-D-Pro-OH as described in Barlos et al. (Barlos et al., 1989). Therefore 0.10 mmol resin was incubated twice for 30 min with 0.6 mmol thionylchloride and subsequently washed with DCM. Following this the resin was incubated 90 min with 0.6 mmol Fmoc-D-Pro-OH, 2.4 mmol DIPEA in 6 ml DCM. Afterwards the resin was blocked three times for 10 min using a solution of 10% MeOH (v/v), 10% DIPEA (v/v) in DCM and washed with DCM. Automated synthesis was done using an ABI 433 with the FASTmoc protocol. 10 eq. amino acid were activated using 9 eq. HATU and 20 eq. DIPEA in NMP. Coupling time was 45 min and Fmoc-deprotection was performed three times for 7 min with 20% (v/v) piperidine in NMP. Double coupling was performed after coupling of 46 amino acids. Acetylation of the N-terminus was performed with 10% (v/v) acetic anhydride and 10% (v/v) DIPEA in DMF three times for 10 min.

[0414] The cleavage of the fully protected peptide acid was achieved by incubating the peptidyl resin twice in 10 ml 30% (v/v) HFIP in DCM for 2 hours. After filtering off the peptide the solvent was evaporated and the residue precipitated using ice cold diethyl ether. The precipitated peptide was isolated and dried.

[0415] 0.01 mmol fully protected peptide, 4 eq. PyBOP and 5 eq. H-D-Met-OGp(Boc)₂ were dissolved in 6 ml NMP. After addition of 10 eq. DIPEA the mixture was stirred for 4 hours. Following this the solvent was reduced evaporated and the residue precipitated by ice cold diethyl ether. The precipitated peptide ester was dried and subsequently protection groups were cleaved off using 2.5% EDT, 2.5% water, 2.5% TIS in TFA for 2 hours. Following the evaporation of TFA the peptide was precipitated with ice cold diethyl ether. Reversed phase HPLC purification of the peptide ester was performed on a C18 column using an ACN/water gradient. Fractions that contain product were combined and freeze dried.

[0416] The final product was characterised by HPLC (FIG. 18A) and mass spectrometry (FIG. 18B). The experimentally determined mass (8547 Da) corresponded to the theoretical molecular mass (8541 Da).

[0417] 11.8 Synthesis of All-D-Peptide

(5)
H-CDMAKPNGIKVIDDEEVKRLIRELDIADVPGIGNITAEKLKKLGINKL
CDTLSIEFDKLKGMIGEAKAKYLISLARDEYNEPIRTRVRKSIGRIVTMK
RNSRNLEEIKPYLFRAIEESYYKLDKRIPKAIHVVAVTEDLDIVSRGRTF
PHGISKETAYSESVKLLQKILEEDERKIRRIGVRFSKFIEAIGLDKFFD
T-OH

By Native Chemical Ligation of Peptide 4 with Peptide 3

[0418] Both peptides 3 and 4 are solved 0.2 M in TRIS-buffer (pH 8.6) containing 2% SDS, 1% thiophenol and 5 mM tris(2-carboxyethyl)phosphine hydrochloride. The reaction mixture shaked 72 h by room temperature. Afterwards the mixture is purified is by reversed-phase HPLC. For removal of the N-terminal Z-protecting group the peptide was solved in 270 eq. TFA and 50 eq. thioanisol and shakes for 6 h at room temperature (Yoshiaki Kiso et al, 1980). After evaporation of TFA the peptide was precipitated and washed by ice-cold diethyl ether and purified again by reversed-phase HPLC (Phenomenex, Aschaffenburg, Germany). Analysis of the free peptide 5 is performed by SDS-PAGE, reversed phase UPLC and ESI-mass spectrometry. The correct mass of the product is found.

[0419] 11.9 Synthesis of All-D-Peptide

(8)
Ac-MIVLFVDFDYFYAQVEEVLNPSLKGKPVVVCVFSGRFEDSGAVATAN
YEARKFGVKAGIPIVEAKKILPNAVYLPMRKEVYQQVSSRIMNLLREYSE
KIEIASIDEAYLDISDKVRDYREAYNLGLEIKNKILEKEKITVTVGISKN
KVFAKIA-SMe

By Protease-Catalyzed Ligation of Peptide 6 with Peptide 7

[0420] Peptide 6 was solved 0.2 mM and peptide 7 was solved 0.6 mM in sodium-phosphate buffer (100 mM, pH 8.5, with 100 mM NaCl) containing 4 M Urea. After addition of 20 μM Clostripain (Endoprotease Arg-C, Worthington Biochemical Corporation, Lakewood, N.J., USA) the reaction mixture was shaken overnight at 37° C. The precipitated peptides were centrifuged, solved in H₂O/Formic Acid 80/20 and will be purified by reversed phase HPLC using a RP-18-column (Phenomenex, Aschaffenburg, Germany) with a gradient of ACN in water of 5% to 95% within 30 min. The final peptide was analyzed by SDS-PAGE (FIG. 19A) and ESI-mass spectrometry (FIG. 19B). A band was found in lane 1 between 14.4 kDa and 21.5 kDa indicating the ligation product. The theoretical molecular weight of the ligation product (Mₜₕₑₒᵣ=17476 Da) corresponds the observed molecular weight (M_{obs}=17486 Da) as shown by ESI-MS.

[0421] 11.10 Synthesis of the All-D Polymerase Dpo Variant A115C/V203C by Native Chemical Ligation of Peptide 8 with Peptide 5

[0422] Both peptides 5 and 8 are solved 0.2 M in TRIS-buffer (pH 8.6) containing 2% Triton X100, 1% thiophenol and 5 mM tris(2-carboxyethyl)phosphine hydrochloride. The reaction mixture shakes 72 h by room temperature. Afterwards the mixture is purified by reversed-phase HPLC and analyzed by SDS-PAGE, reversed phase UPLC and ESI-mass spectrometry. The correct mass of the ligation product is found.

### EXAMPLE 12

### Synthesis of a Polymerase Dpo4 Variant A71C/A155C/V203C Consisting of D-Amino Acids

[0423] Within the example the synthesis of the all-D polymerase Dpo variant A71C/A155C/V203C is described. The amino acid sequence of the all-D polymerase Dpo variant A71C/A155C/V203C is

Ac-MIVLFVDFDYFYAQVEEVLNPSLKGKPVVVCVFSGRFEDSGAVATAN
YEARKFGVKAGIPIVEAKKILPNCVYLPMRKEVYQQVSSRIMNLLREYSE
KIEIASIDEAYLDISDKVRDYREAYNLGLEIKNKILEKEKITVTVGISKN
KVFAKIACDMAKPNGIKVIDDEEVKRLIRELDIADVPGIGNITAEKLKKL
GINKLCDTLSIEFDKLKGMIGEAKAKYLISLARDEYNEPIRTRVRKSIGR
IVTMKRNSRNLEEIKPYLFRAIEESYYKLDKRIPKAIHVVAVTEDLDIVS
RGRTFPHGISKETAYSESVKLLQKILEEDERKIRRIGVRFSKFIEAIGLD
KFFDT-NH₂.

[0424] All amino acids used are protected according to the Solid-phase peptide synthesis Fmoc/tBu-strategy requirements (Eric Atherton et al, 1981). All amino acids used are D-amino acids (Bachem, Bubendorf, Switzerland).

[0425] 12.1 Synthesis of Fully Protected All-D-Peptide H-

(1)
RTFPHGISKETAYSESVKLLQKILEEDERKIRRIGVRFSKFIEAIGLDKF
FDT-NH2

[0426] 0.1 mmol Fmoc-Sieber rink amide NovaSynTG resin was loaded after Fmoc-deprotection with Fmoc-D-Thr(tBu)-OH using 5 eq. amino acid, eq. 4.9 eq. HATU and 10 eq. DIPEA for 45 min in 6 ml NMP.

[0427] Automated synthesis was done using an ABI 433 synthesizer with the FASTmoc protocol. 10 eq. amino acid were activated using 9 eq. HATU and 20 eq. DIPEA in NMP. Coupling time was 45 min and Fmoc-deprotection was performed three times for 7 min with 20% (v/v) piperidine in NMP. Double coupling was performed after coupling of 42 amino acids.

[0428] The cleavage of the fully protected peptide acid was achieved by incubating the peptidyl resin twice in 10 ml 1% (v/v) TFA in DCM for 2 hours. After filtering off the resin the solvent was evaporated and the peptide was precipitated using ice cold diethyl ether. Finally the peptide was isolated and dried.

[0429] The final product was characterised by HPLC and mass spectrometry (FIG. 13). The calculated mass for the product (6244 Da) corresponds to the measured mass (6249 Da).

[0430] 12.2 Synthesis of Fully Protected All-D-Peptide

(3)
Boc-CDTLSIEF DKLKGMIGEA
KAKYLISLAR DEYNEPIRTR VRKSIGRIVT MKRNSRNLEE
IKPYLFRAIE ESYYKLDKRI PKAIHVVAVT EDLDIVSRG-OH

[0431] 0.10 mmol TentaGel-R-Trityl resin was loaded with Fmoc-D-Gly-OH as described in Barlos et al. (Barlos et al., 1989). Therefore 0.10 mmol resin was incubated twice for 30 min with 0.6 mmol thionylchloride and subsequently washed with DCM. Following this the resin was incubated 90 min with 0.6 mmol Fmoc-Gly-OH, 2.4 mmol DIPEA in 6 ml DCM. Afterwards the resin was blocked three times for 10 min using a solution of 10% MeOH (v/v), 10% DIPEA (v/v) in DCM and washed with DCM. Automated synthesis was done using an ABI 433 with the FASTmoc protocol. 10 eq. amino acid were activated using 9 eq. HATU and 20 eq. DIPEA in NMP. Coupling time was 45 min and Fmoc-deprotection was performed three times for 7 min with 20% (v/v) piperidine in NMP. Double coupling steps were performed after coupling of 39 amino acids.

[0432] The identity of the synthesized peptide was characterised after TFA cleavage of a small amount of peptidyl resin by HPLC and mass spectrometry (FIG. 14). The experimentally determined mass of the product (11289 Da) was in accordance to the theoretical value (11286 Da).

[0433] The cleavage of the fully protected peptide acid was achieved by incubating the peptidyl resin twice in 10 ml 1% (v/v) TFA in DCM for 2 hours. After filtering off the resin the solvent was evaporated and the peptide was precipitated using ice cold diethyl ether. Finally the peptide was isolated and dried.

[0434] 12.3 Synthesis of All-D-Peptide

(5)
H-CDTLSIEFDKLKGMIGEAKAKYLISLARDEYNEPIRTRVRKSIGRIVT
MKRNSRNLEEIKPYLFRAIEESYYKLDKRIPKAIHVVAVTEDLDIVSRGR
TFPHGISKETAYSESVKLLQKILEEDERKIRRIGVRFSKFIEAIGLDKFF
DT-NH₂

By Fragment Condensation of Peptide 1 with Peptide 3.

[0435] 5 μmole (3) and 1 eq. (1) were dissolved in 25% (v/v) TFE in DCM. After addition of 5 eq. PyBOP and 10 eq. DIPEA the mixture was stirred overnight. After evaporating the solvent the peptide was precipitated using ice cold diethyl ether and filtered off.

[0436] The cleavage of the side chain protection groups of the peptide was performed with 2.5% EDT, 2.5% water, 2.5% TIS in TFA for 2 hours. Following the evaporation of TFA the peptide was precipitated with ice cold diethyl ether. Reversed phase HPLC purification of the N-terminal Fmoc-protected peptide was performed on a C18 column using an ACN/water gradient. Fractions that contain product were combined and freeze dried.

[0437] The final product was characterised by HPLC and mass spectrometry (FIG. 15). The experimentally determined mass (17531 Da) corresponds to the theoretical molecular mass (17512 Da).

[0438] 12.4 Synthesis of All-D-Peptide

(9)
H-CVYLPMRKEVYQQVSSRIMNLLREYSEKIEIASIDEAYLDISDKVRDY
REAYNLGLEIKNKILEKEKITVTVGISKNKVFAKIA-SBz1

[0439] 0.10 mmol TentaGel-R-Trityl resin was loaded with Fmoc-D-Ala-OH as described in Barlos et al. (Barlos et al., 1989). Therefore 0.10 mmol resin was incubated twice for 30 min with 0.6 mmol thionylchloride and subsequently washed with DCM. Following this the resin was incubated 90 min with 0.6 mmol Fmoc-D-Ala-OH, 2.4 mmol DIPEA in 6 ml DCM. Afterwards the resin was blocked three times for 10 min using a solution of 10% MeOH (v/v), 10% DIPEA (v/v) in DCM and washed with DCM. Automated synthesis was done using an ABI 433 with the FASTmoc protocol. 10 eq. amino acid were activated using 9 eq. HATU and 20 eq. DIPEA in NMP. Coupling time was 45 min and Fmoc-deprotection was performed three times for 7 min with 20% (v/v) piperidine in NMP. Double coupling was performed after coupling of 44 amino acids. Acetylation of the N-terminus was performed with 10% (v/v) acetic anhydride and 10% (v/v) DIPEA in DMF three times for 10 min.

[0440] The cleavage of the fully protected peptide acid was achieved by incubating the peptidyl resin twice in 10 ml 30% (v/v) HFIP in DCM for 2 hours. After filtering off the resin the solvent was evaporated and the residue precipitated using ice cold diethyl ether. The precipitated peptide was isolated and dried.

[0441] 0.005 mmol fully protected peptide, 5 eq. PyBOP and 100 eq. benzylmercaptan were dissolved in 6 ml DCM. After addition of 10 eq. DIPEA the mixture was stirred for 4 hours. Following this the solvent was reduced evaporated and the residue precipitated by ice cold diethyl ether. The precipitated peptide ester was dried and subsequently protection groups were cleaved off using 2.5% EDT, 2.5% water, 2.5% TIS in TFA for 2 hours. Following the evaporation of TFA the peptide was precipitated with ice cold diethyl ether. Reversed phase HPLC purification of the peptide ester was performed on a C18 column using an ACN/water gradient. Fractions that contain exclusively product were combined and freeze dried.

[0442] The final product was characterised by UPLC (FIG. 21) and mass spectrometry (FIG. 22). The molecular mass of the product determined by mass spectrometry (9926 Da) was in accordance to the calculated mass (9923 Da).

[0443] 12.5 Synthesis of

(11)
Ac-MIVLFVDFDYFYAQVEEVLNPSLKGKPVVVCVFSGRFEDSGAVATAN
YEARKFGVKAGIPIVEAKKILPN-SBzl

[0444] 0.10 mmol TentaGel-R-Trityl resin was loaded with Fmoc-D-Asn(Trt)-OH as described in Barlos et al. (Barlos et al., 1989). Therefore 0.10 mmol resin was incubated twice for 30 min with 0.6 mmol thionylchloride and subsequently washed with DCM. Following this the resin was incubated 90 min with 0.6 mmol Fmoc-D-Asn(Trt)-OH, 2.4 mmol DIPEA in 6 ml DCM. Afterwards the resin was blocked three times for 10 min using a solution of 10% MeOH (v/v), 10% DIPEA (v/v) in DCM and washed with DCM. Automated synthesis was done using an ABI 433 with the FASTmoc protocol. 10 eq. amino acid were activated using 9 eq. HATU and 20 eq. DIPEA in NMP. Coupling time was 45 min and Fmoc-deprotection was performed three times for 7 min with 20% (v/v) piperidine in NMP. Double coupling was performed after coupling of 40 amino acids. Acetylation of the N-terminus was performed with 10% (v/v) acetic anhydride and 10% (v/v) DIPEA in DMF three times for 10 min.

[0445] The cleavage of the fully protected peptide acid was achieved by incubating the peptidyl resin twice in 10 ml 30% (v/v) HFIP in DCM for 2 hours. After filtering off the peptide the solvent was evaporated and the residue precipitated using ice cold diethyl ether. The precipitated peptide was isolated and dried.

[0446] 0.005 mmol fully protected peptide, 5 eq. PyBOP and 100 eq. benzylmercaptane were dissolved in 6 ml DCM. After addition of 10 eq. DIPEA the mixture was stirred for 4 hours. Following this the solvent was reduced evaporated and the residue precipitated by ice cold diethyl ether. The precipitated peptide ester was dried and subsequently protection groups were cleaved off using 2.5% EDT, 2.5% water, 2.5% TIS in TFA for 2 hours. Following the evaporation of TFA the peptide was precipitated with ice cold diethyl ether. Reversed phase HPLC purification of the peptide ester was performed on a C18 column using an ACN/water gradient. Fractions that contain exclusively product were combined and freeze dried.

[0447] The final product was characterised by UPLC (FIG. 23) and mass spectrometry (FIG. 24). The molecular mass of the product determined by mass spectrometry (7848 Da) was in accordance to the calculated mass (7845 Da).

[0448] 12.6 Synthesis of All-D-Peptide

(7)
Z-CDMAKPNGIKVIDDEEVKRLIRELDIADVPGIGNITAEKLKKLGINKL-
benzyl-thioester

[0449] 0.10 mmol TentaGel-R-Trityl resin was loaded with Fmoc-D-Leu-OH as described in Barlos et al. (Barlos et al., 1989). Therefore 0.10 mmol resin was incubated twice for 30 min with 0.6 mmol thionylchloride and subsequently washed with DCM. Following this the resin was incubated 90 min with 0.6 mmol Fmoc-D-Leu-OH, 2.4 mmol DIPEA in 6 ml DCM. Afterwards the resin was blocked three times for 10 min using a solution of 10% MeOH (v/v), 10% DIPEA (v/v) in DCM and washed with DCM. Automated synthesis was done using an ABI 433 with the FASTmoc protocol. 10 eq. amino acid were activated using 9 eq. HATU and 20 eq. DIPEA in NMP. Coupling time was 45 min and Fmoc-deprotection was performed three times for 7 min with 20% (v/v) piperidine in NMP.

[0450] The cleavage of the fully protected peptide acid was achieved by incubating the peptidyl resin twice in 10 ml 30% (v/v) HFIP in DCM for 2 hours. After filtering off the peptide the solvent was evaporated and the residue precipitated using ice cold diethyl ether. The precipitated peptide was isolated and dried.

[0451] The N-terminal Z- and completely side chain protected peptide 4 was solved 1 mM in DMF. After addition of 5 eq. PyBOP, 10 eq. DIPEA and 30 eq. benzyl mercaptan the mixture was stirred for 4 h. Then the DMF was evaporated, the peptide was precipitated and washed with ice-cold diethyl ether. The side chain protecting groups were removed by treatment with 2.5% EDT, 2.5% water, 2.5% TIS in TFA for 2 hours. After the evaporation of TFA the peptide was precipitated and washed with ice cold diethyl ether. The peptide-benzyl-thioester was then purified by reversed-phase HPLC and analyzed by reversed-phase UPLC (FIG. 25 A) and ESI-MS (FIG. 25 B). The theoretical molecular weight (Mₜₕₑₒᵣ=5527 Da) corresponds the observed molecular weight (M_{obs}=5534 Da) as shown by ESI-LC-MS.

[0452] 12.7 Synthesis of All-D-Peptide

(8)
H-CDMAKPNGIKVIDDEEVKRLIRELDIADVPGIGNITAEKLKKLGINKL
CDTLSIEFDKLKGMIGEAKAKYLISLARDEYNEPIRTRVRKSIGRIVTMK
RNSRNLEEIKPYLFRAIEESYYKLDKRIPKAIHVVAVTEDLDIVSRGRTF
PHGISKETAYSESVKLLQKILEEDERKIRRIGVRFSKFIEAIGLDKFFD
T-NH₂.

By Native Chemical Ligation of Peptide 7 with Peptide 5.

[0453] Both peptides 5 and 7 were solved 0.2 M in sodium-phosphate-buffer (100 mM, with 100 mM NaCl, pH 8) containing 2% Triton X100, 1% thiophenol and 5 mM tris(2-carboxyethyl)phosphine hydrochloride. The reaction mixture was shaken 48 h by room temperature. Afterwards the mixture was purified by reversed-phase HPLC on a RP-8-column (Vydac 208 TP, Grace GmbH & Co KG, Worms, Germany) by using a gradient of 30% to 80% ACN/methanol 1:1 in water/1% TFA within 30 min. Fractions containing product were pooled and purified in a second step by size exclusion chromatography on a Yarra 3u SEC-2000-column (Phenomenex, Aschaffenburg, Germany) using a 50 mM sodium-phosphate-buffer, pH 6, as mobile phase. After removal of salts in water/1% formic acid using a HiTrap desalting-column 5 ml (GE Healthcare GmbH, München, Germany) the peptide product fractions were freeze dried. For removal of the N-terminal Z-protecting group the peptide was solved in 270 eq. TFA and 50 eq. thioanisol and shaken for 6 h at room temperature (Yoshiaki Kiso et al, 1980). After evaporation of TFA the peptide was precipitated and washed by ice-cold diethyl ether. Analysis of the free peptide 8 was performed by SDS-PAGE (FIG. 26 A) and ESI-LC-mass spectrometry (FIG. 26 B). A band was found in between the 20 kDa-band and the 25 kDa-band of the marker indicating the ligation product. The theoretical molecular weight of the ligation product (Mₜₕₑₒᵣ=22781 Da) corresponds the observed molecular weight (M_{obs}=22796 Da) as shown by ESI-LC-MS.

[0454] 12.8 Synthesis of All-D-Peptide

(11)
Ac-MIVLFVDFDYFYAQVEEVLNPSLKGKPVVVCVFSGRFEDSGAVATA
NYEARKFGVKAGIPIVEAIUULPNCVYLPMRKEVYQQVSSRIMNLLREY
SEKIEIASIDEAYLDISDKVRDYREAYNLGLEIKNKILEKEKITVTVGI
SKNKVFAKIA-SBzl

By Native Chemical Ligation of Peptide 10 with Peptide 9

[0455] Peptide 10 and peptide 9 were solved 0.5 mM in sodium-phosphate buffer (100 mM, pH 8, with 100 mM NaCl) containing 6 M guanidine-HCl, 5 mM tris(2-carboxyethyl)phosphine hydrochloride and 2% thiophenol. The reaction mixture was shaken for 72 h at room temperature. Hereupon the thiophenol-precipitate was centrifuged and the supernatant was purified by size exclusion chromatography using an Agilent SEC-3-column (Agilent Technologies Deutschland GmbH, Böblingen, Germany) and 6 M guanidine-HCl in 50 mM sodium-phosphate-buffer pH 6 as mobile phase. Fractions containing peptide were afterwards desalted in water/1% formic acid at a HiTrap desalting-column 5 ml (GE Healthcare GmbH, München, Germany). After freeze drying fractions were analyzed by SDS-PAGE (FIG. 27 A) and ESI-LC-mass-spectrometry (FIG. 27 B). A band was found in lanes 3 to 6 between the 15 kDa-band and 20 kDa-band of the marker indicating the ligation product. The theoretical molecular weight of the ligation product (Mₜₕₑₒᵣ=17641 Da) corresponds the observed molecular weight (M_{obs}=17641 Da) as shown by ESI-LC-MS.

[0456] 12.9 Synthesis of the All-D Polymerase Dpo4 Variant A71C/A155C/V203C by Native Chemical Ligation of Peptide 11 with Peptide 8

[0457] Both peptides 11 and 8 were solved 50 μM in sodium-phosphate-buffer (pH 8, 100 mM with 100 mM NaCl) containing 2% Triton X100, 1% thiophenol and 5 mM tris(2-carboxyethyl)phosphine hydrochloride. The reaction mixture was shaken 72 h by room temperature. Afterwards the reaction mixture was analyzed by SDS-PAGE (FIG. 28 A+B) and ESI-LC-mass spectrometry (FIG. 28 C). A band was found in lane 3 of the coomasie-stained gel (A) and in the corresponding lane of the silver-stained gel (B) between the 37 kDa-band and 50 kDa-band of the marker and in the exact high of the native L-Dpo4 indicating the ligation product. The theoretical molecular weight of the ligation product (Mₜₕₑₒᵣ=40298 Da) corresponds the observed molecular weight (M_{obs}=40945 Da) as shown by ESI-MS (C). The by 647 Da higher measured mass may be caused by a Triton X-100 adduct.

### EXAMPLE 13

### Synthesis of Polymerase Dpo4 Variant M76G/A155C/V203C Consisting of D-Amino Acids

[0458] Within the example the synthesis of the all-D polymerase Dpo variant M76G/A155C/V203C is described. The amino acid sequence of the all-D polymerase Dpo variant M76G/A155C/V203C is

Ac-MIVLFVDFDYFYAQVEEVLNPSLKGKPVVVCVFSGRFEDSGAVATA
NYEARKFGVKAGIPIVEAKKILPNAVYLPGRKEVYQQVSSRIMNLLREY
SEKIEIASIDEAYLDISDKVRDYREAYNLGLEIKNKILEKEKITVTVGI
SKNKVFAKIACDMAKPNGIKVIDDEEVKRLIRELDIADVPGIGNITAEK
LKKLGINKLCDTLSIEFDKLKGMIGEAKAKYLISLARDEYNEPIRTRVR
KSIGRIVTMKRNSRNLEEIKPYLFRAIEESYYKLDKRIPKAIHVVAVTE
DLDIVSRGRTFPHGISKETAYSESVKLLQKILEEDERKIRRIGVRFSKF
IEAIGLDKFFDT-NH2.

[0459] All amino acids used are protected according to the Solid-phase peptide synthesis Fmoc/tBu-strategy requirements (Eric Atherton et al, 1981). All amino acids used are D-amino acids (Bachem, Bubendorf, Switzerland).

[0460] 13.1 Synthesis of H-Gly-OGp(Boc)₂

[0461] 1 mmol Z-Gly-OH, 0.9 eq. TBTU and 0.9 mmol HO-Gp(Boc)₂ were dissolved in 10 ml DMF. After addition of 2 eq. DIPEA the solution was stirred for 2 hours. After evaporating the solvent the raw product was purified with flash chromatography using DCM:EE 9:1. Pure fractions of Z-Gly-OGp(Boc)₂ were combined and the solvent was evaporated. Z-Gly-OGp(Boc)₂ was dissolved in 10 ml MeOH and flushed with argon. Hydrolytic cleavage of the N-terminal Z-group was achieved by the addition of Pd/C catalyst and H₂ in 2 hours. After filtrating off the catalyst the solvent was evaporated under reduced pressure. Analytics were performed using reversed phase HPLC and mass spectrometry. The calculated mass of 408 Da is in accordance to the experimentally determined mass of 409 Da.

[0462] 13.2 Synthesis of Fully Protected All-D-Peptide H-R TFPHGISKET AYSESVKLLQ KILEEDERKI RRIGVRFSKF IEAIGLDKFF DT-NHS (1)

[0463] 0.1 mmol Fmoc-Sieber rink amide NovaSynTG resin was loaded after Fmoc-deprotection with Fmoc-D-Thr(tBu)-OH using 5 eq. amino acid, eq. 4.9 eq. HATU and 10 eq. DIPEA for 45 min in 6 ml NMP.

[0464] Automated synthesis was done using an ABI 433 synthesizer with the FASTmoc protocol. 10 eq. amino acid were activated using 9 eq. HATU and 20 eq. DIPEA in NMP. Coupling time was 45 min and Fmoc-deprotection was performed three times for 7 min with 20% (v/v) piperidine in NMP. Double coupling was performed after coupling of 42 amino acids.

[0465] The cleavage of the fully protected peptide acid was achieved by incubating the peptidyl resin twice in 10 ml 1% (v/v) TFA in DCM for 2 hours. After filtering off the resin the solvent was evaporated and the peptide was precipitated using ice cold diethyl ether. Finally the peptide was isolated and dried.

[0466] The final product was characterised by HPLC and mass spectrometry (FIG. 13). The calculated mass for the product (6244 Da) corresponds to the measured mass (6249 Da).

[0467] 13.3 Synthesis of Fully Protected All-D-Peptide

(3)
Boc-CDTLSIEF DKLKGMIGEA
KAKYLISLAR DEYNEPIRTR VRKSIGRIVT MKRNSRNLEE
IKPYLFRAIE ESYYKLDKRI PKAIHVVAVT EDLDIVSRG-OH

[0468] 0.10 mmol TentaGel-R-Trityl resin was loaded with Fmoc-Gly-OH as described in Barlos et al. (Barlos et al., 1989). Therefore 0.10 mmol resin was incubated twice for 30 min with 0.6 mmol thionylchloride and subsequently washed with DCM. Following this the resin was incubated 90 min with 0.6 mmol Fmoc-Gly-OH, 2.4 mmol DIPEA in 6 ml DCM. Afterwards the resin was blocked three times for 10 min using a solution of 10% MeOH (v/v), 10% DIPEA (v/v) in DCM and washed with DCM. Automated synthesis was done using an ABI 433 with the FASTmoc protocol. 10 eq. amino acid were activated using 9 eq. HATU and 20 eq. DIPEA in NMP. Coupling time was 45 min and Fmoc-deprotection was performed three times for 7 min with 20% (v/v) piperidine in NMP. Double coupling steps were performed after coupling of 39 amino acids.

[0469] The identity of the synthesized peptide was characterised after TFA cleavage of a small amount of peptidyl resin by HPLC and mass spectrometry (FIG. 14). The experimentally determined mass of the product (11289 Da) was in accordance to the theoretical value (11286 Da).

[0470] The cleavage of the fully protected peptide acid was achieved by incubating the peptidyl resin twice in 10 ml 1% (v/v) TFA in DCM for 2 hours. After filtering off the resin the solvent was evaporated and the peptide was precipitated using ice cold diethyl ether. Finally the peptide was isolated and dried.

[0471] 13.4 Synthesis of All-D-Peptide

(5)
H-CDTLSIEFDKLKGMIGEAKAKYLISLARDEYNEPIRTRVRKSIGRIV
TMKRNSRNLEEIKPYLFRAIEESYYKLDKRIPKAIHVVAVTEDLDIVSR
GRTFPHGISKETAYSESVKLLQKILEEDERKIRRIGVRFSKFIEAIGLD
KFFDT-NH₂

By Fragment Condensation of Peptide 1 with Peptide 3.

[0472] 5 μmole (3) and 1 eq. (1) were dissolved in 25% (v/v) TFE in DCM. After addition of 5 eq. PyBOP and 10 eq. DIPEA the mixture was stirred overnight. After evaporating the solvent the peptide was precipitated using ice cold diethyl ether and filtered off.

[0473] The cleavage of the side chain protection groups of the peptide was performed with 2.5% EDT, 2.5% water, 2.5% TIS in TFA for 2 hours. Following the evaporation of TFA the peptide was precipitated with ice cold diethyl ether. Reversed phase HPLC purification of the N-terminal Fmoc-protected peptide was performed on a C18 column using an ACN/water gradient. Fractions that contain product were combined and freeze dried.

[0474] The final product was characterised by HPLC and mass spectrometry (FIG. 15). The experimentally determined mass (17531 Da) corresponds to the theoretical molecular mass (17512 Da).

[0475] 13.5 Synthesis of All-D-Peptide

(9)
H-RKEVYQQVSSRIMNLLREYSEKIEIASIDEAYLDISDKVRDYREAYNL
GLEIKNKILEKEKITVTVGISKNKVFAKIA-SBzl

[0476] 0.10 mmol TentaGel-R-Trityl resin was loaded with Fmoc-D-Ala-OH as described in Barlos et al. (Barlos et al., 1989). Therefore 0.10 mmol resin was incubated twice for 30 min with 0.6 mmol thionylchloride and subsequently washed with DCM. Following this the resin was incubated 90 min with 0.6 mmol Fmoc-D-Ala-OH, 2.4 mmol DIPEA in 6 ml DCM. Afterwards the resin was blocked three times for 10 min using a solution of 10% MeOH (v/v), 10% DIPEA (v/v) in DCM and washed with DCM. Automated synthesis was done using an ABI 433 with the FASTmoc protocol. 10 eq. amino acid were activated using 9 eq. HATU and 20 eq. DIPEA in NMP. Coupling time was 45 min and Fmoc-deprotection was performed three times for 7 min with 20% (v/v) piperidine in NMP. Double coupling was performed after coupling of 44 amino acids. Acetylation of the N-terminus was performed with 10% (v/v) acetic anhydride and 10% (v/v) DIPEA in DMF three times for 10 min.

[0477] The cleavage of the fully protected peptide acid was achieved by incubating the peptidyl resin twice in 10 ml 30% (v/v) HFIP in DCM for 2 hours. After filtering off the resin the solvent was evaporated and the residue precipitated using ice cold diethyl ether. The precipitated peptide was isolated and dried.

[0478] 0.005 mmol fully protected peptide, 5 eq. PyBOP and 100 eq. benzylmercaptan were dissolved in 6 ml DCM. After addition of 10 eq. DIPEA the mixture was stirred for 4 hours. Following this the solvent was reduced evaporated and the residue precipitated by ice cold diethyl ether. The precipitated peptide ester was dried and subsequently protection groups were cleaved off using 2.5% EDT, 2.5% water, 2.5% TIS in TFA for 2 hours. Following the evaporation of TFA the peptide was precipitated with ice cold diethyl ether. Reversed phase HPLC purification of the peptide ester was performed on a C18 column using an ACN/water gradient. Fractions that contain exclusively product were combined and freeze dried.

[0479] The final product was characterised by UPLC (FIG. 29) and mass spectrometry (FIG. 30). The molecular mass of the product determined by mass spectrometry (9217 Da) was in accordance to the calculated mass (9217 Da).

[0480] 13.6 Synthesis of

(10)
Ac-MIVLFVDFDY FYAQVEEVLNP SLKGKPVVV CVFSGRFEDS
GAVATANYEA RKFGVKAGIP IVEAKKILPN AVYLPG-OGp

[0481] 0.10 mmol TentaGel-R-Trityl resin was loaded with Fmoc-D-Pro-OH as described in Barlos et al. (Barlos et al., 1989). Therefore 0.10 mmol resin was incubated twice for 30 min with 0.6 mmol thionylchloride and subsequently washed with DCM. Following this the resin was incubated 90 min with 0.6 mmol Fmoc-D-Pro-OH, 2.4 mmol DIPEA in 6 ml DCM. Afterwards the resin was blocked three times for 10 min using a solution of 10% MeOH (v/v), 10% DIPEA (v/v) in DCM and washed with DCM. Automated synthesis was done using an ABI 433 with the FASTmoc protocol. 10 eq. amino acid were activated using 9 eq. HATU and 20 eq. DIPEA in NMP. Coupling time was 45 min and Fmoc-deprotection was performed three times for 7 min with 20% (v/v) piperidine in NMP. Double coupling was performed after coupling of 45 amino acids. Acetylation of the N-terminus was performed with 10% (v/v) acetic anhydride and 10% (v/v) DIPEA in DMF three times for 10 min.

[0482] The cleavage of the fully protected peptide acid was achieved by incubating the peptidyl resin twice in 10 ml 30% (v/v) HFIP in DCM for 2 hours. After filtering off the peptide the solvent was evaporated and the residue precipitated using ice cold diethyl ether. The precipitated peptide was isolated and dried.

[0483] 0.005 mmol fully protected peptide, 5 eq. PyBOP and 10 eq. H-Gly-OGp(Boc)₂ were dissolved in 6 ml DCM. After addition of 10 eq. DIPEA the mixture was stirred for 4 hours. Following this the solvent was reduced evaporated and the residue precipitated by ice cold diethyl ether. The precipitated peptide ester was dried and subsequently protection groups were cleaved off using 2.5% EDT, 2.5% water, 2.5% TIS in TFA for 2 hours. Following the evaporation of TFA the peptide was precipitated with ice cold diethyl ether. Reversed phase HPLC purification of the peptide ester was performed on a C18 column using an ACN/water gradient. Fractions that contain product were combined and freeze dried.

[0484] The final product was characterised by UPLC (FIG. 31) and mass spectrometry (FIG. 32). The molecular mass of the product determined by mass spectrometry (8481 Da) was in accordance to the calculated mass (8473 Da).

[0485] 13.7 Synthesis of All-D-Peptide

(7)
Z-CDMAKPNGIKVIDDEEVKRLIRELDIADVPGIGNITAEKLKKLGINKL-
benzyl-thioester

[0486] 0.10 mmol TentaGel-R-Trityl resin was loaded with Fmoc-D-Leu-OH as described in Barlos et al. (Barlos et al., 1989). Therefore 0.10 mmol resin was incubated twice for 30 min with 0.6 mmol thionylchloride and subsequently washed with DCM. Following this the resin was incubated 90 min with 0.6 mmol Fmoc-D-Leu-OH, 2.4 mmol DIPEA in 6 ml DCM. Afterwards the resin was blocked three times for 10 min using a solution of 10% MeOH (v/v), 10% DIPEA (v/v) in DCM and washed with DCM. Automated synthesis was done using an ABI 433 with the FASTmoc protocol. 10 eq. amino acid were activated using 9 eq. HATU and 20 eq. DIPEA in NMP. Coupling time was 45 min and Fmoc-deprotection was performed three times for 7 min with 20% (v/v) piperidine in NMP.

[0487] The cleavage of the fully protected peptide acid was achieved by incubating the peptidyl resin twice in 10 ml 30% (v/v) HFIP in DCM for 2 hours. After filtering off the peptide the solvent was evaporated and the residue precipitated using ice cold diethyl ether. The precipitated peptide was isolated and dried.

[0488] The N-terminal Z- and completely side chain protected peptide 4 was solved 1 mM in DMF. After addition of 5 eq. PyBOP, 10 eq. DIPEA and 30 eq. benzyl mercaptan the mixture was stirred for 4 h. Then the DMF was evaporated, the peptide was precipitated and washed with ice-cold diethyl ether. The side chain protecting groups were removed by treatment with 2.5% EDT, 2.5% water, 2.5% TIS in TFA for 2 hours. After the evaporation of TFA the peptide was precipitated and washed with ice cold diethyl ether. The peptide-benzyl-thioester was then purified by reversed-phase HPLC and analyzed by reversed-phase UPLC (FIG. 25A) and ESI-MS (FIG. 25B). The theoretical molecular weight (Mₜₕₑₒᵣ=5527 Da) corresponds the observed molecular weight (M_{obs}=5534 Da) as shown by ESI-LC-MS.

[0489] 13.8 Synthesis of All-D-Peptide

(8)
H-CDMAKPNGIKVIDDEEVKRLIRELDIADVPGIGNITAEKLKKLGINK
LCDTLSIEFDKLKGMIGEAKAKYLISLARDEYNEPIRTRVRKSIGRIVT
MKRNSRNLEEIKPYLFRAIEESYYKLDKRIPKAIHVVAVTEDLDIVSRG
RTFPHGISKETAYSESVKLLQKILEEDERKIRRIGVRFSKFIEAIGLDK
FFDT-NH₂

By Native Chemical Ligation of Peptide 7 with Peptide 5

[0490] Both peptides 5 and 7 were solved 0.2 M in sodium-phosphate-buffer (100 mM, with 100 mM NaCl, pH 8) containing 2% Triton X100, 1% thiophenol and 5 mM tris(2-carboxyethyl)phosphine hydrochloride. The reaction mixture was shaken 48 h by room temperature. Afterwards the mixture was purified by reversed-phase HPLC on a RP-8-column (Vydac 208 TP, Grace GmbH & Co KG, Worms, Germany) by using a gradient of 30% to 80% ACN/methanol 1:1 in water/1% TFA within 30 min. Fractions containing product were pooled and purified in a second step by size exclusion chromatography on a Yana 3u SEC-2000-column (Phenomenex, Aschaffenburg, Germany). The peptide product fractions were freeze dried. For removal of the N-terminal Z-protecting group the peptide was solved in 270 eq. TFA and 50 eq. thioanisol and shaken for 6 h at room temperature (Yoshiaki Kiso et al, 1980). After evaporation of TFA the peptide was precipitated and washed by ice-cold diethyl ether. Analysis of the free peptide 8 was performed by SDS-PAGE (FIG. 26A) and ESI-LC-mass spectrometry (FIG. 26B). A band was found in between the 20 kDa-band and the 25 kDa-band of the marker indicating the ligation product. The theoretical molecular weight of the ligation product (Mₜₕₑₒᵣ=22781 Da) corresponds the observed molecular weight (M_{obs}=22796 Da) as shown by ESI-LC-MS.

[0491] 13.9 Synthesis of All-D-Peptide

(11)
Ac-MIVLFVDFDYFYAQVEEVLNPSLKGKPVVVCVFSGRFEDSGAVATAN
YEARKIFGVKAGIPIVEAIUULPNAVYLPGRKEVYQQVSSRIMNLLREYS
EKIEIASIDEAYLDISDKVRDYREAYNLGLEIKNKILEKEKITVTVGISK
NKVFAKIA-SBzl

By Protease-Catalyzed Ligation of Peptide 10 with Peptide 9.

[0492] Peptide 10 was solved 0.2 mM and peptide 9 was solved 0.6 mM in sodium-phosphate buffer (100 mM, pH 8, with 100 mM NaCl) containing 4 M Urea. After addition of 20 μM Clostripain (Endoprotease Arg-C, Worthington Biochemical Corporation, Lakewood, N.J., USA) the reaction mixture was shaken overnight at 37° C. Hereupon 6 M guanidine-HCl were added and the mixture was purified by size exclusion chromatography using an Agilent SEC-3-column (Agilent Technologies Deutschland GmbH, Böblingen, Germany) with 6 M guanidine-HCl in 50 mM sodium-phosphate-buffer pH 6 as mobile phase. Fractions containing peptide were afterwards desalted in water/1% formic acid at a HiTrap desalting column 5 ml (GE Healthcare GmbH, München, Germany). After freeze drying fractions were analyzed by SDS-PAGE (FIG. 33A) and ESI-LC-mass-spectrometry. (FIG. 33B). A band was found in lanes 3 and 4 between 15 kDa and 20 kDa indicating the ligation product. The theoretical molecular weight of the ligation product (Mₜₕₑₒᵣ=17612 Da) corresponds the observed molecular weight (M_{obs}=17641 Da) as shown by ESI-MS.

[0493] 13.10 Synthesis of the All-D Polymerase Dpo4 Variant M76G/A155C/V203C by Native Chemical Ligation of Peptide 11 with Peptide 8

[0494] Both peptides 11 and 8 are solved 0.2 M in TRIS-buffer (pH 8.6) containing 2% Triton X100, 1% thiophenol and 5 mM tris(2-carboxyethyl)phosphine hydrochloride. The reaction mixture shakes 72 h by room temperature. Afterwards the mixture is purified by reversed-phase HPLC and analyzed by SDS-PAGE, reversed phase UPLC and ESI-mass spectrometry. The correct mass of the ligation product is found.

### EXAMPLE 14

### Synthesis of Polymerase Dpo4 Variant A71C/A155C/V203C Consisting of D-Amino Acids by an Alternative Synthesis Strategy

[0495] Within the example the synthesis of the all-D polymerase Dpo variant A71C/A155C/V203C is described. The amino acid sequence of the all-D polymerase Dpo variant A71C/A155C/V203C is

Ac-MIVLFVDFDYFYAQVEEVLNPSLKGKPVVVCVFSGRFEDSGAVATAN
YEARKFGVKAGIPIVEAKKILPNCVYLPMRKEVYQQVSSRIMNLLREYSE
KIEIASIDEAYLDISDKVRDYREAYNLGLEIKNKILEKEKITVTVGISKN
KVFAKIACDMAKPNGIKVIDDEEVKRLIRELDIADVPGIGNITAEKLKKL
GINKLCDTLSIEFDKLKGMIGEAKAKYLISLARDEYNEPIRTRVRKSIGR
IVTMKRNSRNLEEIKPYLFRAIEESYYKLDKRIPKAIHVVAVTEDLDIVS
RGRTFPHGISKETAYSESVKLLQKILEEDERkIRRIGVRFSKFIEAIGLD
KFFDT-NH₂.

[0496] All amino acids used are protected according to the Solid-phase peptide synthesis Fmoc/tBu-strategy requirements (Eric Atherton et al, 1981). All amino acids used are D-amino acids (Bachem, Bubendorf, Switzerland).

[0497] 14.1 Synthesis of Fully Protected All-D-Peptide H-

KAIHVVAVTEDLDIVSRGRTFPHGISKETAYSESVKLLQKILEEDERKIR
RIGVRFSKFIEAIGLDKFFDT-NH₂

[0498] 0.1 mmol Fmoc-Sieber rink amide NovaSynTG resin was loaded after Fmoc-deprotection with Fmoc-D-Thr(tBu)-OH using 5 eq. amino acid, eq. 4.9 eq. HATU and 10 eq. DIPEA for 45 min in 6 ml NMP.

[0499] Automated synthesis was done using an ABI 433 synthesizer with the FASTmoc protocol. 10 eq. amino acid were activated using 9 eq. HATU and 20 eq. DIPEA in NMP. Coupling time was 45 min and Fmoc-deprotection was performed three times for 7 min with 20% piperidine (v/v) in NMP. Double coupling was performed after coupling of 42 amino acids.

[0500] The cleavage of the fully protected peptide acid was achieved by incubating the peptidyl resin twice in 10 ml 1% TFA (v/v) in DCM for 2 hours. After filtering off the resin the solvent was evaporated and the peptide was precipitated using ice cold diethyl ether. Finally the peptide was isolated and dried.

[0501] The final product was characterised by HPLC and mass spectrometry (FIG. 34). The calculated mass for the product (8148 Da) corresponds to the measured mass (8156 Da).

[0502] 14.2 Synthesis of Fully Protected All-D-Peptide

(3)
H-CDTLSIEF DKLKGMIGEA KAKYLISLAR DEYNEPIRTR
VRKSIGRIVT MKRNSRNLEE IKPYLFRAIE ESYYKLDKRI
P-OH

[0503] 0.10 mmol TentaGel-R-Trityl resin was loaded with Fmoc-D-Pro-01-1 as described in Barlos et al. (Barlos et al., 1989). Therefore 0.10 mmol resin was incubated twice for 30 min with 0.6 mmol thionylchloride and subsequently washed with DCM. Following this the resin was incubated 90 min with 0.6 mmol Fmoc-D-Pro-OH, 2.4 mmol DIPEA in 6 ml DCM. Afterwards the resin was blocked three times for 10 min using a solution of 10% MeOH (v/v), 10% DIPEA (v/v) in DCM and washed with DCM. Automated synthesis was done using an ABI 433 with the FASTmoc protocol. 10 eq. amino acid were activated using 9 eq. HATU and 20 eq. DIPEA in NMP. Coupling time was 45 min and Fmoc-deprotection was performed three times for 7 min with 20% piperidine (v/v) in NMP. Double coupling steps were performed after coupling of 40 amino acids. The N-terminal Cystein derivative was Boc-D-Cys(Trt)-OH.

[0504] The identity of the synthesized peptide was characterised after TFA cleavage of a small amount of peptidyl resin by HPLC and mass spectrometry (FIG. 35). The experimentally determined mass of the product (9393 Da) was in accordance to the theoretical value (9382 Da).

[0505] The cleavage of the fully protected peptide acid was achieved by incubating the peptidyl resin twice in 10 ml 1% TFA (v/v) in DCM for 2 hours. After filtering off the resin the solvent was evaporated and the peptide was precipitated using ice cold diethyl ether. Finally the peptide was isolated and dried.

[0506] 14.3 Synthesis of All-D-Peptide

(5)
H-CDTLSIEFDKLKGMIGEAKAKYLISLARDEYNEPIRTRVRKSIGRIVT
MKRNSRNLEEIKPYLFRAIEESYYKLDKRIPKAIHVVAVTEDLDIVSRGR
TFPHGISKETAYSESVKLLQKILEEDERKIRRIGVRFSKFIEAIGLDKFF
DT-NH₂

By Fragment Condensation of Peptide 1 with Peptide 3.

[0507] 5 μmole (3) and 1 eq. (1) were dissolved in 25% TFE (v/v) in DCM. After addition of 5 eq. PyBOP and 10 eq. DIPEA the mixture was stirred overnight. After evaporating the solvent the peptide was precipitated using ice cold diethyl ether and filtered off.

[0508] The cleavage of the side chain protection groups of the peptide was performed with 2.5% EDT (v/v), 2.5% water (v/v), 2.5% TIS (v/v) in TFA for 2 hours. Following the evaporation of TFA the peptide was precipitated with ice cold diethyl ether. Reversed phase HPLC purification of the N-terminal Fmoc-protected peptide was performed on a C18 column using an ACN/water gradient. Fractions that contain product were combined and freeze dried.

[0509] The final product was characterised by HPLC and mass spectrometry (FIG. 36). The experimentally determined mass (17529 Da) corresponds to the theoretical molecular mass (17512 Da).

[0510] 14.4 Synthesis of all-D-peptide

(9)
H-CVYLPMRKEVYQQVSSRIMNLLREYSEKIEIASIDEAYLDISDKVRDY
REAYNLGLEIKNKILEKEKITVTVGISKNKVFAKIA-NHNH₂

[0511] 0.10 mmol TentaGel-R-Trityl resin was loaded with hydrazide as described in Zheng et al. (Zheng et al., 2013). Therefore 0.10 mmol resin was incubated twice for 30 min with 0.6 mmol thionylchloride and subsequently washed with DCM and 50% DMF (v/v) in DCM. Following this the resin was incubated twice for 30 min with 5% NH₂NH₂ (v/v) in DMF. Afterwards the resin was blocked three times for 10 min using a solution of 10% MeOH (v/v), 10% DIPEA (v/v) in DCM and washed with DCM. Coupling of the first amino acid was achieved by incubating the resin for one hour with 1 mmol Fmoc-D-Ala-OH, 0.9 mmol HATU, 2 mmol DIPEA dissolved in NMP. Automated synthesis was done using an ABI 433 with the FASTmoc protocol. 10 eq. amino acid were activated using 9 eq. HATU and 20 eq. DIPEA in NMP. Coupling time was 45 min and Fmoc-deprotection was performed three times for 7 min with 20% piperidine (v/v) in NMP. Double coupling was performed after coupling of 43 amino acids.

[0512] The cleavage of the peptide hydrazide from the resin was achieved by incubating the peptidyl resin in 2.5% EDT (v/v), 2.5% water (v/v), 2.5% TIS (v/v) in TFA for 2 hours. Following the evaporation of TFA the peptide was precipitated with ice cold diethyl ether. Reversed phase HPLC purification of the peptide ester was performed on a C18 column using an ACN/water gradient. Fractions that contain exclusively product were combined and freeze dried.

[0513] The final product was characterised by UPLC (FIG. 37 A) and mass spectrometry (FIG. 37 B). The molecular mass of the product determined by mass spectrometry (9843 Da) was in accordance to the calculated mass (9830 Da).

[0514] 14.5 Synthesis of

(11)
Ac-MIVLFVDFDYFYAQVEEVLNPSLKGKPVVVCVFSGRFEDSGAVATAN
YEARKFGVKAGIPIVEAKKILPN-SBzl

[0515] 0.10 mmol TentaGel-R-Trityl resin was loaded with Fmoc-D-Asn(Trt)-OH as described in Barlos et al. (Barlos et al., 1989). Therefore 0.10 mmol resin was incubated twice for 30 min with 0.6 mmol thionylchloride and subsequently washed with DCM. Following this the resin was incubated 90 min with 0.6 mmol Fmoc-D-Asn(Trt)-OH, 2.4 mmol DIPEA in 6 ml DCM. Afterwards the resin was blocked three times for 10 min using a solution of 10% MeOH (v/v), 10% DIPEA (v/v) in DCM and washed with DCM. Automated synthesis was done using an ABI 433 with the FASTmoc protocol. 10 eq. amino acid were activated using 9 eq. HATU and 20 eq. DIPEA in NMP. Coupling time was 45 min and Fmoc-deprotection was performed three times for 7 min with 20% piperidine (v/v) in NMP. Double coupling was performed after coupling of 40 amino acids. Acetylation of the N-terminus was performed with 10% acetic anhydride (v/v) and 10% DIPEA (v/v) in DMF three times for 10 min.

[0516] The cleavage of the fully protected peptide acid was achieved by incubating the peptidyl resin twice in 10 ml 30% HFIP (v/v) in DCM for 2 hours. After filtering off the peptide the solvent was evaporated and the residue precipitated using ice cold diethyl ether. The precipitated peptide was isolated and dried.

[0517] 0.005 mmol fully protected peptide, 5 eq. PyBOP and 100 eq. benzylmercaptane were dissolved in 6 ml DCM. After addition of 10 eq. DIPEA the mixture was stirred for 4 hours. Following this the solvent was reduced evaporated and the residue precipitated by ice cold diethyl ether. The precipitated peptide ester was dried and subsequently protection groups were cleaved off using 2.5% EDT (v/v), 2.5% water (v/v), 2.5% TIS (v/v) in TFA for 2 hours. Following the evaporation of TFA the peptide was precipitated with ice cold diethyl ether. Reversed phase HPLC purification of the peptide ester was performed on a C18 column using an ACN/water gradient. Fractions that contain exclusively product were combined and freeze dried.

[0518] The final product was characterised by UPLC (FIG. 23) and mass spectrometry (FIG. 24). The molecular mass of the product determined by mass spectrometry (7848 Da) was in accordance to the calculated mass (7845 Da).

[0519] 14.6 Synthesis of All-D-Peptide

(7)
lipo-CDMAKPNGIKVIDDEEVKRLIRELDIADVPGIGNITAEKLKKLGI
NKL-4-acetamidothiophenylester

[0520] 0.10 mmol TentaGel-R-Trityl resin was loaded with Fmoc-D-Leu-OH as described in Barlos et al. (Barlos et al., 1989). Therefore 0.10 mmol resin was incubated twice for 30 min with 0.6 mmol thionylchloride and subsequently washed with DCM. Following this the resin was incubated 90 min with 0.6 mmol Fmoc-D-Leu-OH, 2.4 mmol DIPEA in 6 ml DCM. Afterwards the resin was blocked three times for 10 min using a solution of 10% MeOH (v/v), 10% DIPEA (v/v) in DCM and washed with DCM. Automated synthesis was done using an ABI 433 with the FASTmoc protocol. 10 eq. amino acid were activated using 9 eq. HATU and 20 eq. DIPEA in NMP. Coupling time was 45 min and Fmoc-deprotection was performed three times for 7 min with 20% (v/v) piperidine in NMP. After the final coupling step Fmoc-deprotection was carried out. The lipo tag was introduced by incubating the resin with 10 eq. 4-Nitrophenyl-2-(octadecylsulfonyl)ethylcarbonate, 10 eq. HOBt and 10 eq. DIPEA in NMP overnight according to Garcia-Echeverria (Garcia-Echeverria, C. 1995). Following this the resin was washed with NMP and DCM.

[0521] The cleavage of the fully protected peptide acid was achieved by incubating the peptidyl resin twice in 10 ml 30% (v/v) HFIP in DCM for 2 hours. After filtering off the peptide the solvent was evaporated and the residue precipitated using ice cold diethyl ether. The precipitated peptide was isolated and dried.

[0522] 0.05 mmol N-terminal lipo- and completely side chain protected peptide 4 was dissolved in DCM. After addition of 5 eq. PyBOP, 10 eq. DIPEA and 30 eq. 4-Acetamidothiophenol the mixture was stirred for 4 h. Then the DCM was evaporated, the peptide was precipitated and washed with ice-cold diethyl ether. The side chain protecting groups were removed by treatment with 2.5% EDT (v/v), 2.5% water (v/v), 2.5% TIS (v/v) in TFA for 2 hours. After the evaporation of TFA the peptide was precipitated and washed with ice cold diethyl ether. The peptide-4-acetamidothiophenylester was then purified by reversed-phase HPLC and analyzed by reversed-phase UPLC and mass spectrometry. The theoretical molecular weight (Mₜₕₑₒᵣ=5844) corresponds the observed molecular weight (M_{obs}=5847) as shown by ESI-LC-MS.

[0523] 14.7 Synthesis of All-D-Peptide

(8)
H-CDMAKPNGIKVIDDEEVKRLIRELDIADVPGIGNITAEKLKKLGINKL
CDTLSIEFDKLKGMIGEAKAKYLISLARDEYNEPIRTRVRKSIGRIVTMK
RNSRNLEEIKPYLFRAIEESYYKLDKRIPKAIHVVAVTEDLDIVSRGRTF
PHGISKETAYSESVKLLQKILEEDERKIRRIGVIZFSKFIEAIGLDKFFD
T-NH₂

By Native Chemical Ligation of Peptide 7 with Peptide 5.

[0524] Both peptides 5 and 7 were dissolved 2 mM in sodium-phosphate-buffer (200 mM, 6 M guanidine HCl, pH 8) containing 200 mM Mercaptophenylacetic acid and 50 mM tris(2-carboxyethyl)phosphine hydrochloride. The reaction mixture was shaken 24 h by room temperature. Afterwards the mixture was purified by reversed-phase HPLC on a RP-4-column (Jupiter 5 μm, 300 Å, Phenomenex, Aschaffenburg, Germany) by using a gradient of 30% to 95% ACN (0.1% TFA) within 30 min. Fractions containing product were combined and freeze dried. Cleavage of the lipo tag was achieved by incubating the dried product with 10% NH₄OH in TFE overnight according to Garcia-Echeverria (Garcia-Echeverria, C. 1995). Purification of the final product was carried out using the same HPLC conditions as described above. The theoretical molecular weight of the ligation product (Mₜₕₑₒᵣ=22781 Da) corresponds the observed molecular weight (M_{obs}=22796 Da) as shown by ESI-LC-MS.

[0525] 14.8 Synthesis of All-D-Peptide

(11)
Ac-MIVLFVDFDYFYAQVEEVLNPSLKGKPVVVCVFSGRFEDSGAVATAN
YEARKFGVKAGIPIVEAKKILPNCVYLPMRKEVYQQVSSRIMNLLREYSE
KIEIASIDEAYLDISDKVRDYREAYNLGLEIKNKILEKEKITVTVGISKN
KVFAKIA-NHNH₂

By Native Chemical Ligation of Peptide 10 with Peptide 9

[0526] Peptide 10 and peptide 9 were solved 2 mM in sodium-phosphate buffer (200 mM, 6 M guanidine-HCl, pH 8) containing 200 mM Mercaptophenylacetic acid and 50 mM tris(2-carboxyethyl)phosphine hydrochloride. The reaction mixture was shaken for 24 h at room temperature. HPLC-purification was carried out using a C4 column (Jupiter 5 μm, 300 Å, Phenomenex, Aschaffenburg, Germany) and a gradient of 30-95% ACN (0.1% TFA) in 30 min. Product containing fractions were combined and freeze dried. The theoretical molecular weight of the ligation product (Mₜₕₑₒᵣ=17641 Da) corresponds the observed molecular weight (M_{obs}=17641 Da) as shown by ESI-LC-MS.

[0527] 14.9 Synthesis of the All-D Polymerase Dpo4 Variant A71C/A155C/V203C by Native Chemical Ligation of Peptide 11 with Peptide 8

[0528] Oxidation of the hydrazide functionality of peptide 11, transformation into a thioester and native chemical ligations is done according to Zheng et al. (Zheng et al., 2013). Peptide 11 is dissolved 2 mM in sodium-phosphate-buffer (200 mM, 6 M guanidine-HCl, pH 3) and placed in a −15° C. ice-bath. Oxidation is achieved by adding NaNO₂ to give a final concentration of 50 mM. After 15 min the solution is mixed with a 2 mM solution of peptide 8 in sodium-phosphate-buffer (200 mM, 6 M guanidine-HCl, pH 8) containing 200 mM Mercaptophenylacetic acid and 50 mM TCEP.

[0529] The reaction mixture is shaken 24 h by room temperature. Afterwards the reaction mixture is analyzed by SDS-PAGE and ESI-LC-mass spectrometry.

### EXAMPLE 15

### Activity Confirmation of Synthetic Polymerase Dpo4 Consisting of D-Amino Acids

[0530] This example describes a PCR activity test for all-D polymerase Dpo4 variants A155C/V203C, A71C/A155C/V203C and M76G/A155C/V203C according to examples 11, 12, 13 and 14, wherein all-D polymerase Dpo4 variant A71C/A155C/V203C can be produced the synthesis and ligation according to example 13 or 14.

[0531] Surprisingly, the synthetic all-D polymerase Dpo4 variants A155C/V203C, A71C/A155C/V203C and M76G/A155C/V203C are active without extra refolding efforts and thus is used without further refolding procedure. Protein concentration is estimated by sodium dodecyl sulphate (abbr. SDS) polyacrylamide gel electrophoresis (abbr. PAGE) on pre-cast gels (Invitrogen, Karlsruhe, Germany) using a standard series of known protein concentrations followed by SYPRO-RED staining (Invitrogen, Karlsruhe, Germany) and densiometric band analysis on a BioRad Fx scanner instrument.

[0532] 14.1 Templates for PCR Activity Assay

[0533] Template for the PCR reaction is a 83-mer single-stranded L-DNA oligonucleotide (MJ_1_105_LD) from which, in the first thermal cycle, the opposite strand is made. Thereafter both strands serve as template for exponential amplification. Template DNA oligonucleotide and DNA primers are synthesized at NOXXON in L-configuration.

[0534] List of oligonucleotides for PCR activity assay:

| | Length, | Config- | |
|---|---|---|---|
| Name | nt | uration | Sequence (5′→3′) |
| MJ_1_105_LD | 83 | L | GTGGAACCGACAACTTGTGCTGCGTCCAGCATAAGA |
| | | | AAGGAGCTCCCTCAGAAGAAGCTGCGCAGCGTGCCA |
| | | | GTCTGAGCTCC |
| MJ_oligo_187_LD | 38 | L | TCTAATACGACTCACTATAGGAGCTCAGACTGGCAC |
| | | | GC |
| MJ oligo_189_LD | 20 | L | GTGGAACCGACAACTTGTGC |

[0535] 14.2 PCR Reactions

[0536] 15 μl PCR reactions contain 0.2 mM each of the four L-dNTP's, 10 nM 83-mer ssDNA (MJ_1_105_LD) template, 1 μM of forward and reverse primer, lx ThermoPol buffer (Invitrogen, 20 mM Tris-HCl, 10 mM KCl, 10 mM (NH₄)₂SO₄, 2 mM MgSO₄, 0.1% Triton X-100, pH 8.8@25° C.) and at least 0.67 ng/μl all-D polymerase Dpo4 variant A155C/V203C. The forward primer is MJ_oligo_187_LD yielding a PCR product of 102 bp, which is distinguishable from the 83-mer template. The reverse primer is MJ_oligo_89_LD. The L-dNTP's are purchased as custom synthesis by Rasayan, Inc. (Encinitas, Calif., USA).

[0537] Negative controls are conducted by omitting the all-D polymerase Dpo4 variant A155C/V203C.

[0538] The thermal cycling program consists of 1 cycle (85° C., 3 min) then at least 7 cycles (85° C., 30 sec/56° C., 1 min/60° C., 4 min) then hold at 4° C. 4 μl aliquots of the PCR reactions are mixed with sample loading buffer and analyzed on TBE gels. A DNA standard ladder containing, among others, a 100 bp band is applied on the gel.

[0539] 14.3 Activity Confirmation

[0540] The PCR reaction with all-D polymerase Dpo4 variant A155C/V203C and L-DNA substrate and L-nucleotides yields a band in the range of about 100 bp as compared with the DNA standard ladder. Said band does not appear in the negative controls, where polymerase is omitted. Also said 102 bp band migrates higher than the 83-mer template. The all-D polymerase Dpo4 variant A155C/V203C dependent appearance of an L-DNA amplification product thus confirms the activity of the synthetic all-D polymerase Dpo4 variant A155C/V203C in a thermal amplification process.

### EXAMPLE 15

### Synthesis of D- or L-Nucleic Acids

[0541] L-DNA nucleic acids or D-DNA nucleic acids were produced by solid-phase synthesis with an ABI 394 synthesizer (Applied Biosystems, Foster City, Calif., USA) using 2′TBDMS DNA phosphoramidite chemistry with standard exocyclic amine protecting groups (Damha and Ogilvie, 1993). For the DNA synthesis dA(N-Bz)-, dC(N-Ac)-, dG(N-ibu)-, and dT in the D- and L-configuration were applied. All phosphoramidites were purchased from ChemGenes, Wilmington, Mass. After synthesis and deprotection L-DNA nucleic acids or D-DNA nucleic acids were purified by gel electrophoresis.

### REFERENCES

[0542] The complete bibliographic data of the documents recited herein are, if not indicated to the contrary, as follows, whereby the disclosure of said references is incorporated herein by reference.
[0543] Altschul S. F., Gish W., et al. (1990) Basic local alignment search tool. J Mol Biol. 215(3):403-10.
[0544] Altschul S. F., Madden T. L., et al. (1997) Gapped BLAST and PSI-BLAST: a new generation of protein database search programs. Nucleic Acids Res. 25(17):3389-402.
[0545] Atherton E., Logan C. J. and Sheppard R. C. (1981) Peptide synthesis. Part 2. Procedures for solid-phase synthesis using Nu-fluorenylmethoxycarbonylamino-acids on polyamide supports. Synthesis of substance P and of acyl carrier protein 65-74 decapeptide J. Chem. Soc., Perkin Trans. 1, 538-546
[0546] Barlos, K., Gatos, D., Kallitsis, J., Papaphotiu, G., Sotiriu, P., Yao, W. Q. and Schäfer, W. (1989) Darstellung geschatzter Peptid-Fragmente unter Einsatz substituierter Triphenylmethyl-Harze. Tetrahedron Letters. 30(30):3943-3946
[0547] Bock L. C., Griffin L. C., Latham J. A., Vermaas E. H. and Toole J. J. (1992) Selection of single-stranded DNA molecules that bind and inhibit human thrombin. Nature. 355(6360):564-6.
[0548] Boudsocq, F., S. Iwai, et al. (2001). “Sulfolobus solfataricus P2 DNA polymerase IV (Dpo4): an archaeal DinB-like DNA polymerase with lesion-bypass properties akin to eukaryotic poleta.” Nucleic Acids Res 29(22): 4607-16. Burmeister P. E. et al (2006) 2′-Deoxy purine, 2′-O-methyl pyrimidine (dRmY) aptamers as candidate therapeutics. Oligonucleotides. 16(4):337-51.
[0549] Damha M J, Ogilvie K K. (1993) Oligoribonucleotide synthesis. The silyl-phosphoramidite method. Methods Mol Biol. 20:81-114
[0550] Garcia-Echeverria, C. (1995) On the use of hydrophobic probes in the chromatographic purification of solid-phase synthesized peptides. J. Chem. Soc., Chem. Commun. 779-780
[0551] Ellington A. D. and Szostak J. W. (1990) In vitro selection of RNA molecules that bind specific ligands. Nature. 346(6287):818-22.
[0552] Freier S. M. and Altmann K. H. (1997) The ups and downs of nucleic acid duplex stability: structure-stability studies on chemically-modified DNA:RNA duplexes. Nucleic Acids Res. 25(22):4429-43.
[0553] Klussmann S. (2006). The Aptamer Handbook—Functional Oligonucleotides and their Applications. Edited by S. Klussmann. WILEY-VCH, Weinheim, Germany, ISBN 3-527-31059-2
[0554] Klussmann S., Nolte A., Bald R., Erdmann V. A. and Fürste J. P. (1996) Mirror-image RNA that binds D-adenosine. Nat Biotechnol. 14(9):1112-5.
[0555] Kusser W. (2000) Chemically modified nucleic acid aptamers for in vitro selections: evolving evolution. J Biotechnol 74(1): 27-38.
[0556] Mairal T., Ozalp V. C., Lozano Sánchez P., et al. (2008) Aptamers: molecular tools for analytical applications. Anal Bioanal Chem. 390(4):989-1007
[0557] Mandal K., Uppalapati M., Ault-Riché D., Kenney J., Lowitz J., Sidhu S. S. and Kent S. B. H. (2012) Chemical synthesis and X-ray structure of a heterochiral {D-protein antagonist plus vascular endothelial growth factor} protein complex by racemic crystallography. PNAS. 109(37)
[0558] McGinnis S., Madden T. L. et al. (2004) BLAST: at the core of a powerful and diverse set of sequence analysis tools. Nucleic Acids Res. 32(Web Server issue):W20-5.
[0559] Needleman and Wunsch (1970) A general method applicable to the search for similarities in the amino acid sequence of two proteins. J Mol Biol. 48(3):443-53.
[0560] Nolte A., Klussmann S., Bald R., Erdmann V. A. and Fürste J. P. (1996) Mirror-design of L-oligonucleotide ligands binding to L-arginine. Nat Biotechnol. 14(9):1116-9.
[0561] Oliveros, M., R. J. Yanez, et al. (1997). “Characterization of an African swine fever virus 20-kDa DNA polymerase involved in DNA repair.” J Biol Chem 272(49): 30899-910.
[0562] Pearson and Lipman (1988) Improved tools for biological sequence comparison. Proc. Nat'l. Acad. Sci. USA 85: 2444
[0563] Sambrook et al. (ed.), (1989) Molecular Cloning: A Laboratory Manual, 2nd ed., vol. 1-3, Cold Spring Harbor Laboratory Press, Cold Spring Harbor, N.Y.
[0564] Sekizaki, H., Itoh, K., Toyota, E. and Tanizawa, K. (1996) Synthesis and tryptic hydrolysis of p-guanidinophenyl esters derived from amino acids and peptides. Chemical & Pharmaceutical Bulletin. 44(8):1577-9
[0565] Sekizaki, H., Itoh, K., Toyota, E. and Tanizawa, K. (1996) Trypsin-catalyzed peptide synthesis and various p-guanidinophenyl esters as acyl donors. Chemical & Pharmaceutical Bulletin. 44(8):1585-7
[0566] Sharma, I. and Crich, D. (2011) Direct Fmoc-Chemistry-Based Solid-Phase Synthesis of Peptidyl Thioesters. Journal of Organic Chemistry. 76(16):6518-24
[0567] Smith and Waterman (1981), Adv. Appl. Math. 2: 482
[0568] Tuerk C. and Gold L. (1990) Systematic evolution of ligands by exponential enrichment: RNA ligands to bacteriophage T4 DNA polymerase. Science. 249(4968):505-10.
[0569] Usman N. and Cedergren R. (1992) Exploiting the chemical synthesis of RNA. Trends Biochem Sci. 17(9):334-9
[0570] Venkatesan N., Kim S. J., et al. (2003) Novel phosphoramidite building blocks in synthesis and applications toward modified oligonucleotides. Curr Med Chem 10(19): 1973-91
[0571] Wincott F, DiRenzo A, et al. (1995). Synthesis, deprotection, analysis and purification of RNA and ribozymes. Nucleic Acids Res.; 23(14):2677-84.
[0572] Zheng J., Tang S., et al. (2013) Chemical synthesis of proteins using peptide hydrazides as thioester surrogates. Nature Protocols, 8(12), 2483-95

[0573] The features of the present invention disclosed in the specification, the claims and/or the drawings may both separately and in any combination thereof be material for realizing the invention in various forms thereof.

1. A method (a) for adding one or more L-nucleotides to the 3′end of a first L-nucleic acid, wherein the method comprises the step of reacting the one or more L-nucleotides with the first L-nucleic acid in the presence of the protein of claim 49 comprising a mutant enzymatic activity exhibiting moiety, wherein the enzymatic activity adds one or more L-nucleotides to the 3′ end of the first L-nucleic acid or (b) for amplifying a target L-nucleic acid in the presence of L-nucleotides and the protein of claim 49 comprising a mutant enzymatic activity exhibiting moiety, wherein the mutant enzymatic activity exhibiting moiety amplifies the target L-nucleic acid in the presence of L-nucleotides.

2.-48. (canceled)

49. A protein comprising a mutant enzymatic activity exhibiting moiety, wherein the mutant enzymatic activity exhibiting moiety comprises an amino acid sequence, wherein the amino acids of the amino acid sequence are D-amino acids, wherein the mutant enzymatic activity adds one or more L-nucleotides to the 3′ end of a first L-nucleic acid or amplifies a target L-nucleic acid in the presence of L-nucleotides,
wherein the mutant enzymatic activity exhibiting moiety is a variant of an enzymatic activity exhibiting moiety, wherein the enzymatic activity exhibiting moiety consists of an amino acid sequence according to SEQ ID NO:15 and wherein the amino acids of the amino acid sequence according to SEQ ID NO:15 are D-amino acids,
wherein the amino acid sequence of the mutant enzymatic activity exhibiting moiety differs from the amino acid sequence of the enzymatic activity exhibiting moiety consisting of an amino acid sequence according to SEQ ID NO:15 at least at one amino acid position, preferably at three amino acid positions, and/or
wherein the amino acid sequence of the mutant enzymatic activity exhibiting moiety is a truncated form of an amino acid sequence according to SEQ ID NO:15, and
wherein the amino acid sequence of the mutant enzymatic activity exhibiting moiety is different from an amino acid sequence according to any of SEQ ID Nos:15 to 22 and 51.

50. The protein according to claim 49, wherein the amino acid sequence of the mutant enzymatic activity exhibiting moiety differs from the amino acid sequence of the enzymatic activity exhibiting moiety consisting of an amino acid sequence according to SEQ ID NO:15 at the following amino acid position(s) of the amino acid sequence according to SEQ ID NO:15 or at amino acid position(s) corresponding thereto:
a) at least one of amino acid positions 71, 76, 67, or 86, or
b) amino acid position 155 or 203 and 71; or
c) amino acid position 155 or 203 and 31; or
d) amino acid position 155 or 203 and 76; or
e) amino acid position 155 or 203 and 67; or
f) amino acid position 155 or 203 and 86; or
g) amino acid position 155 or 203 and 96, or
h) amino acid position 155 or 203 and 85, or
i) amino acid position 155 and 203 and 71, or
j) amino acid position 155 and 203 and 86, or
k) amino acid position 155 and 203 and 31, or
l) amino acid position 155 and 203 and 76, or
m) amino acid position 155 and 203 and 67, or
n) amino acid position 155 and 203 and 86, or
o) amino acid position 155 and 203 and 96, or
p) amino acid position 155 and 203 and 85,
wherein in any one of a) to p), the amino acid at positions 155, 203, 71, 67, 85 and 96 is substituted by cysteine, the amino acid at position 31 is substituted by serine, the amino acid at position 76 is substituted by glycine or alanine, and the amino acid at position 86 is substituted by glycine or cysteine.

51. The protein according to claim 50, wherein the mutant enzymatic activity exhibiting moiety comprises an amino acid sequence according to any one of SEQ ID NOs:89 to 120.

52. The protein according to claim 49, wherein the amino acid sequence of the mutant enzymatic activity exhibiting moiety is a truncated form of an amino acid sequence according to SEQ ID NO:15, wherein the truncated form is lacking the n C-terminal amino acids of the amino acid sequence according to SEQ ID NO:15, wherein n is any integer of 1, 2, 3, 4, 5, 6, 7, 8, 9, 10, 11, 12, 13, 14 or 15.

53. The protein according to claim 49, wherein the mutant enzymatic activity exhibiting moiety comprises an amino acid sequence according to any one of SEQ ID NOs: 121, 161, 201, 241 and or 281.

54. The protein according to claim 52, wherein the mutant enzymatic activity exhibiting moiety comprises an amino acid sequence that differs from an amino acid sequence of a truncated form of an amino acid sequence according to SEQ ID NO:15 at least at one amino acid position.

55. The protein according to claim 53, wherein the amino acid sequence of the mutant enzymatic activity exhibiting moiety differs from the amino acid sequence of any one of SEQ ID NOs:121, 161, 201, 241 or 281 at the following position(s) of the amino acid sequence according to any one of SEQ ID NOs: 121, 161, 201, 241 or 281 or at amino acid position(s) corresponding thereto:
a) amino acid position 155 and/or 203 and/or 71, or
b) amino acid position 155 and/or 203 and/or 86, or
c) amino acid position 155 and/or 203 and/or 31, or
d) amino acid position 155 and/or 203 and/or 76, or
e) amino acid position 155 and/or 203 and/or 67, or
f) amino acid position 155 and/or 203 and/or 86, or
g) amino acid position 155 and/or 203 and/or 96, or
h) amino acid position 155 and/or 203 and/or 85,
wherein in any one of a) to h), the amino acid at positions 155, 203, 71, 67, 85 and 96 is substituted by cysteine, the amino acid at position 31 is substituted by serine, the amino acid at position 76 is substituted by glycine or alanine, and the amino acid at position 86 is substituted by glycine or cysteine.

56. The protein according to claim 49, wherein the mutant enzymatic activity exhibiting moiety comprises an amino acid sequence according to any one of SEQ ID Nos:339 to 343.

57. The protein according to claim 49, wherein the amino acid sequence of the protein comprises an amino acid sequence according to any one of SEQ ID NOs:122 to 160, 162 to 200, 202 to 240, 242 to 280, and 282 to 338.

58. The protein according to claim 56, wherein the amino acid sequence of the mutant enzymatic activity exhibiting moiety differs from the amino acid sequence of any one of SEQ ID NOs:339 to 343 at the following position(s) of the amino acid sequence according to any one of SEQ ID NOs:339 to 343, or at amino acid position(s) corresponding thereto:
a) amino acid position 155 and/or 203 and/or 71, or
b) amino acid position 155 and/or 203 and/or 86, or
c) amino acid position 155 and/or 203 and/or 31, or
d) amino acid position 155 and/or 203 and/or 76, or
e) amino acid position 155 and/or 203 and/or 67, or
f) amino acid position 155 and/or 203 and/or 86, or
g) amino acid position 155 and/or 203 and/or 96, or
h) amino acid position 155 and/or 203 and/or 85,
wherein in any one of a) to h)—the amino acid at positions 155, 203, 71, 67, 85 and 96 is substituted by cysteine, the amino acid at position 31 is substituted by serine, the amino acid at position 76 is substituted by glycine or alanine, and the amino acid at position 86 is substituted by glycine or cysteine.

59. The protein according to claim 49, wherein the mutant enzymatic activity exhibiting moiety is a polymerase activity exhibiting moiety.

60. The protein according to claim 49, wherein the mutant enzymatic activity is a polymerase activity.

61. The protein according to claim 60, wherein the polymerase activity is a thermostable polymerase activity.

62. The protein according to claim 60, wherein the polymerase activity is a DNA-polymerase activity.

63. The protein according to claim 62, wherein the DNA-polymerase activity is a DNA-dependent DNA-polymerase activity.

64. The protein according to claim 49, wherein the mutant enzymatic activity exhibiting moiety is an enzyme.

65. The protein according to claim 59, wherein the polymerase activity exhibiting moiety is a polymerase.

66.-80. (canceled)

81. A method for the identification of a target molecule binding L-nucleic acid molecule comprising the following steps of:
(a) generating a heterogeneous population of L-nucleic acid molecules;
(b) contacting the heterogeneous population of L-nucleic acid molecules of step (a) with the target molecule;
(c) separating the L-nucleic acid molecules which are not bound by the target molecule; and
(d) amplifying the L-nucleic acid molecules which are bound by the target molecule with the protein according to claim 49.

82.-86. (canceled)

87. A method for producing the protein of claim 49, wherein the protein consists of an amino acid sequence, wherein the amino acids of the amino acid sequence are D-amino acids, wherein:
a) two or more fragments of the protein are chemically synthesized, whereby the fragments in their entirety form the amino acid sequence of the protein, and
b) the fragments of step a) are ligated to each other by segment condensation, native chemical ligation, enzymatic ligation or combinations thereof.

88. (canceled)

The application's sequence listing, which the Patent Office published only in electronic form, follows.

SEQUENCE LISTING (343 sequences)

SEQ ID NO: 1 - protein, 174 aa, African swine fever virus
MLTLIQGKKIVNHLRSRLAFEYNGQLIKILSKNIVAVGSLRREEKMLNDVDLLIIVPEKKLLKHVLPNIRIKGLSFSVKVCGERKCVLFIEWEKKTYQLDLFTALAEEKPYAIFHFTGPVSYLIRIRAALKKKNYKLNQYGLFKNQTLVPLKITTEKELIKELGFTYRIPKKRL

SEQ ID NO: 2 - protein, 174 aa, Artificial
  Synthetic
MLTLIQGKKIVNHLRSRLAFEYNGQLIKILSKNIVAVGSLRREEKMLNDVDLLIIVPEKKLLKHVLPNIRIKGLSFSVKGCGERKCVLFIEWEKKTYQLDLFTALAEEKPYAIFHFTGPVSYLIRIRAALKKKNYKLNQYGLFKNQTLVPLKITTEKELIKELGFTYRIPKKRL

SEQ ID NO: 3 - protein, 174 aa, Artificial
  Synthetic
MLTLIQGKKIVNHLRSRLAFEYNGQLIKILSKNIVAVGSLRREEKMLNDVDLLIIVPEKKLLKHVLPNIRIKGLSFSVKACGERKCVLFIEWEKKTYQLDLFTALAEEKPYAIFHFTGPVSYLIRIRAALKKKNYKLNQYGLFKNQTLVPLKITTEKELIKELGFTYRIPKKRL

SEQ ID NO: 4 - protein, 174 aa, Artificial
  Synthetic
MLTLIQGKKIVNHLRSRLAFEYNGQLIKILSKNIVAVGSLRREEKMLNDVDLLIIVPEKKLLKHVLPNIRIKGLSFSVKVCGERKCVLFIEWEKKTYQLDLFTALAEEKPYAIFHFTGPVSYLGRIRAALKKKNYKLNQYGLFKNQTLVPLKITTEKELIKELGFTYRIPKKRL

SEQ ID NO: 5 - protein, 174 aa, Artificial
  Synthetic
MLTLIQGKKIVNHLRSRLAFEYNGQLIKILSKNIVAVGSLRREEKMLNDVDLLIIVPEKKLLKHVLPNIRIKGLSFSVKVCGERKSVLFIEWEKKTYQLDLFTALAEEKPYAIFHFTGPVSYLIRIRAALKKKNYKLNQYGLFKNQTLVPLKITTEKELIKELGFTYRIPKKRL

SEQ ID NO: 6 - DNA, 17 bp, Artificial
  Synthetic
  misc_feature (1)..(2): D-nucleotide
  misc_feature (3)..(17): L-nucleotide
gggatcacagtgagtac

SEQ ID NO: 7 - DNA, 17 bp, Artificial
  Synthetic
  misc_feature (1)..(17): L-nucleotide
  misc_feature (1)..(1): Phosphate attached
gtaaaacgacggccagt

SEQ ID NO: 8 - DNA, 33 bp, Artificial
  Synthetic
  misc_feature (1)..(33): L-nucleotide
actggccgtcgttttacagtactcactgtgatc

SEQ ID NO: 9 - DNA, 33 bp, Artificial
  Synthetic
  misc_feature (1)..(33): L-nucleotide
actggccgtcgttttaccgtactcactgtgatc

SEQ ID NO: 10 - DNA, 33 bp, Artificial
  Synthetic
  misc_feature (1)..(33): L-nucleotide
actggccgtcgttttacggtactcactgtgatc

SEQ ID NO: 11 - DNA, 33 bp, Artificial
  Synthetic
  misc_feature (1)..(33): L-nucleotide
actggccgtcgttttactgtactcactgtgatc

SEQ ID NO: 12 - DNA, 17 bp, Artificial
  Synthetic
  misc_feature (1)..(2): D-nucleotide
  misc_feature (3)..(17): L-nucleotide
gggatcacagtgagtac

SEQ ID NO: 13 - DNA, 12 bp, Artificial
  Synthetic
  misc_feature (1)..(12): L-nucleotide
  misc_feature (1)..(1): Phosphate attached
acgacggccagt

SEQ ID NO: 14 - DNA, 33 bp, Artificial
  Synthetic
  misc_feature (133)..(): L-nucleotide
actggccgtcgttctattgtactcactgtgatc

SEQ ID NO: 15 - protein, 352 aa, Sulfolobus solfataricus
MIVLFVDFDYFYAQVEEVLNPSLKGKPVVVCVFSGRFEDSGAVATANYEARKFGVKAGIPIVEAKKILPNAVYLPMRKEVYQQVSSRIMNLLREYSEKIEIASIDEAYLDISDKVRDYREAYNLGLEIKNKILEKEKITVTVGISKNKVFAKIAADMAKPNGIKVIDDEEVKRLIRELDIADVPGIGNITAEKLKKLGINKLVDTLSIEFDKLKGMIGEAKAKYLISLARDEYNEPIRTRVRKSIGRIVTMKRNSRNLEEIKPYLFRAIEESYYKLDKRIPKAIHVVAVTEDLDIVSRGRTFPHGISKETAYSESVKLLQKILEEDERKIRRIGVRFSKFIEAIGLDKFFDT

SEQ ID NO: 16 - protein, 352 aa, Artificial
  Synthetic
MIVLFVDFDYFYAQVEEVLNPSLKGKPVVVCVFSGRFEDSGAVATANYEARKFGVKAGIPIVEAKKILPNAVYLPMRKEVYQQVSSRIMNLLREYSEKIEIASIDEAYLDISDKVRDYREAYNLGLEIKNKILEKEKITVTVGISKNKVFAKIACDMAKPNGIKVIDDEEVKRLIRELDIADVPGIGNITAEKLKKLGINKLVDTLSIEFDKLKGMIGEAKAKYLISLARDEYNEPIRTRVRKSIGRIVTMKRNSRNLEEIKPYLFRAIEESYYKLDKRIPKAIHVVAVTEDLDIVSRGRTFPHGISKETAYSESVKLLQKILEEDERKIRRIGVRFSKFIEAIGLDKFFDT

SEQ ID NO: 17 - protein, 352 aa, Artificial
  Synthetic
MIVLFVDFDYFYAQVEEVLNPSLKGKPVVVCVFSGRFEDSGAVATANYEARKFGVKAGIPIVEAKKILPNAVYLPMRKEVYQQVSSRIMNLLREYSEKIEIASIDEAYLDISDKVRDYREAYNLGLEIKNKILEKEKITVTVGISKNKVFAKIAADMAKPNGIKVIDDEEVKRLIRELDIADVPGIGNITAEKLKKLGINKLCDTLSIEFDKLKGMIGEAKAKYLISLARDEYNEPIRTRVRKSIGRIVTMKRNSRNLEEIKPYLFRAIEESYYKLDKRIPKAIHVVAVTEDLDIVSRGRTFPHGISKETAYSESVKLLQKILEEDERKIRRIGVRFSKFIEAIGLDKFFDT

SEQ ID NO: 18 - protein, 352 aa, Artificial
  Synthetic
MIVLFVDFDYFYAQVEEVLNPSLKGKPVVVCVFSGRFEDSGAVATANYEARKFGVKAGIPIVEAKKILPNAVYLPMRKEVYQQVSSRIMNLLREYSEKIEIASIDEAYLDISDKVRDYREAYNLGLEIKNKILEKEKITVTVGISKNKVFAKIACDMAKPNGIKVIDDEEVKRLIRELDIADVPGIGNITAEKLKKLGINKLCDTLSIEFDKLKGMIGEAKAKYLISLARDEYNEPIRTRVRKSIGRIVTMKRNSRNLEEIKPYLFRAIEESYYKLDKRIPKAIHVVAVTEDLDIVSRGRTFPHGISKETAYSESVKLLQKILEEDERKIRRIGVRFSKFIEAIGLDKFFDT

SEQ ID NO: 19 - protein, 352 aa, Artificial
  Synthetic
MIVLFVDFDYFYAQVEEVLNPSLKGKPVVVSVFSGRFEDSGAVATANYEARKFGVKAGIPIVEAKKILPNAVYLPMRKEVYQQVSSRIMNLLREYSEKIEIASIDEAYLDISDKVRDYREAYNLGLEIKNKILEKEKITVTVGISKNKVFAKIAADMAKPNGIKVIDDEEVKRLIRELDIADVPGIGNITAEKLKKLGINKLVDTLSIEFDKLKGMIGEAKAKYLISLARDEYNEPIRTRVRKSIGRIVTMKRNSRNLEEIKPYLFRAIEESYYKLDKRIPKAIHVVAVTEDLDIVSRGRTFPHGISKETAYSESVKLLQKILEEDERKIRRIGVRFSKFIEAIGLDKFFDT

SEQ ID NO: 20 - protein, 352 aa, Artificial
  Synthetic
MIVLFVDFDYFYAQVEEVLNPSLKGKPVVVCVFSGRFEDSGAVATANYEARKFGVKAGIPIVEAKKILPNAVYLPMRKEVYQQVCSRIMNLLREYSEKIEIASIDEAYLDISDKVRDYREAYNLGLEIKNKILEKEKITVTVGISKNKVFAKIAADMAKPNGIKVIDDEEVKRLIRELDIADVPGIGNITAEKLKKLGINKLVDTLSIEFDKLKGMIGEAKAKYLISLARDEYNEPIRTRVRKSIGRIVTMKRNSRNLEEIKPYLFRAIEESYYKLDKRIPKAIHVVAVTEDLDIVSRGRTFPHGISKETAYSESVKLLQKILEEDERKIRRIGVRFSKFIEAIGLDKFFDT

SEQ ID NO: 21 - protein, 352 aa, Artificial
  Synthetic
MIVLFVDFDYFYAQVEEVLNPSLKGKPVVVCVFSGRFEDSGAVATANYEARKFGVKAGIPIVEAKKILPNAVYLPMRKEVYQQVSCRIMNLLREYSEKIEIASIDEAYLDISDKVRDYREAYNLGLEIKNKILEKEKITVTVGISKNKVFAKIAADMAKPNGIKVIDDEEVKRLIRELDIADVPGIGNITAEKLKKLGINKLVDTLSIEFDKLKGMIGEAKAKYLISLARDEYNEPIRTRVRKSIGRIVTMKRNSRNLEEIKPYLFRAIEESYYKLDKRIPKAIHVVAVTEDLDIVSRGRTFPHGISKETAYSESVKLLQKILEEDERKIRRIGVRFSKFIEAIGLDKFFDT

SEQ ID NO: 22 - protein, 352 aa, Artificial
  Synthetic
MIVLFVDFDYFYAQVEEVLNPSLKGKPVVVCVFSGRFEDSGAVATANYEARKFGVKAGIPIVEAKKILPNAVYLPMRKEVYQQVSSRIMNLLREYCEKIEIASIDEAYLDISDKVRDYREAYNLGLEIKNKILEKEKITVTVGISKNKVFAKIAADMAKPNGIKVIDDEEVKRLIRELDIADVPGIGNITAEKLKKLGINKLVDTLSIEFDKLKGMIGEAKAKYLISLARDEYNEPIRTRVRKSIGRIVTMKRNSRNLEEIKPYLFRAIEESYYKLDKRIPKAIHVVAVTEDLDIVSRGRTFPHGISKETAYSESVKLLQKILEEDERKIRRIGVRFSKFIEAIGLDKFFDT

SEQ ID NO: 23 - DNA, 83 bp, Artificial
  Synthetic
  misc_feature (1)..(83): L-nucleotide
gtggaaccgacaacttgtgctgcgtccagcataagaaaggagctccctcagaagaagctgcgcagcgtgccagtctgagctcc

SEQ ID NO: 24 - DNA, 38 bp, Artificial
  Synthetic
  misc_feature (1)..(38): L-nucleotide
tctaatacgactcactataggagctcagactggcacgc

SEQ ID NO: 25 - DNA, 20 bp, Artificial
  Synthetic
  misc_feature (1)..(20): L-nucleotide
gtggaaccgacaacttgtgc

SEQ ID NO: 26 - DNA, 528 bp, Artificial
  Synthetic
atgctgaccctgattcagggcaaaaaaatcgtgaaccatctgcgtagccgtctggcctttgaatataacggccagctgattaaaattctgagcaaaaacattgtggcggtgggcagcctgcgtcgtgaagaaaaaatgctgaacgatgtggatctgctgattattgtgccggaaaaaaaactgctgaaacatgtgctgccgaacattcgtattaaaggcctgagctttagcgtgaaagtgtgcggcgaacgtaaatgcgtgctgtttatcgaatgggaaaaaaaaacctaccagctggacctgtttaccgcgctggccgaagaaaaaccgtatgcgatctttcattttaccggtccggtgagctatctgattcgtattcgtgcggcgctgaaaaaaaaaaactacaaactgaaccagtatggcctgtttaaaaaccagaccctggtgccgctgaaaattaccaccgaaaaagaactgattaaagaactgggctttacctatcgcattccgaaaaaacgcctgtaataa

SEQ ID NO: 27 - protein, 210 aa, Artificial
  Synthetic
MRGSHHHHHHGMASMTGGQQMGRDLYDDDDKDRWGSMLTLIQGKKIVNHLRSRLAFEYNGQLIKILSKNIVAVGSLRREEKMLNDVDLLIIVPEKKLLKHVLPNIRIKGLSFSVKVCGERKCVLFIEWEKKTYQLDLFTALAEEKPYAIFHFTGPVSYLIRIRAALKKKNYKLNQYGLFKNQTLVPLKITTEKELIKELGFTYRIPKKRL

SEQ ID NO: 28 - DNA, 34 bp, Artificial
  Synthetic
tccggtgagctatctgggtcgtattcgtgcggcg

SEQ ID NO: 29 - DNA, 34 bp, Artificial
  Synthetic
cgccgcacgaatacgacccagatagctcaccgga

SEQ ID NO: 30 - DNA, 31 bp, Artificial
  Synthetic
tgagctttagcgtgaaagggtgcggcgaacg

SEQ ID NO: 31 - DNA, 31 bp, Artificial
  Synthetic
cgttcgccgcaccctttcacgctaaagctca

SEQ ID NO: 32 - DNA, 31 bp, Artificial
  Synthetic
tgagctttagcgtgaaagcgtgcggcgaacg

SEQ ID NO: 33 - DNA, 31 bp, Artificial
  Synthetic
cgttcgccgcacgctttcacgctaaagctca

SEQ ID NO: 34 - DNA, 36 bp, Artificial
  Synthetic
tgaaagtgtgcggcgaacgtaaaagcgtgctgttta

SEQ ID NO: 35 - DNA, 36 bp, Artificial
  Synthetic
taaacagcacgcttttacgttcgccgcacactttca

SEQ ID NO: 36 - DNA, 15 bp, Artificial
  Synthetic
gatcacagtgagtac

SEQ ID NO: 37 - DNA, 17 bp, Artificial
  Synthetic
  misc_feature (1)..(1): Phosphate attached
gtaaaacgacggccagt

SEQ ID NO: 38 - DNA, 33 bp, Artificial; identical to SEQ ID NO: 8
  Synthetic

SEQ ID NO: 39 - DNA, 33 bp, Artificial; identical to SEQ ID NO: 9
  Synthetic

SEQ ID NO: 40 - DNA, 33 bp, Artificial; identical to SEQ ID NO: 10
  Synthetic

SEQ ID NO: 41 - DNA, 33 bp, Artificial; identical to SEQ ID NO: 11
  Synthetic

SEQ ID NO: 42 - DNA, 12 bp, Artificial
  Synthetic
  misc_feature (1)..(1): Phosphate attached
acgacggccagt

SEQ ID NO: 43 - protein, 39 aa, Artificial
  Synthetic
  MISC_FEATURE (1)..(1): Ac attached
  MISC_FEATURE (39)..(39): 4-guanidinphenol attached
MLTLIQGKKIVNHLRSRLAFEYNGQLIKILSKNIVAVGS

SEQ ID NO: 44 - protein, 40 aa, Artificial
  Synthetic
  MISC_FEATURE (40)..(40): SMe attached
RREEKMLNDVDLLIIVPEKKLLKHVLPNIRIKGLSFSVKA

SEQ ID NO: 45 - protein, 94 aa, Artificial
  Synthetic
CGERKCVLFIEWEKKTYQLDLFTALAEEKPYAIFHFTGPVSYLIRIRAALKKKNYKLNQYGLFKNQTLVPLKITTEKELIKELGFTYRIPKKRL

SEQ ID NO: 46 - protein, 80 aa, Artificial
  Synthetic
  MISC_FEATURE (1)..(1): Ac attached
  MISC_FEATURE (80)..(80): SMe attached
MLTLIQGKKIVNHLRSRLAFEYNGQLIKILSKNIVAVGSLRREEKMLNDVDLLIIVPEKKLLKHVLPNIRIKGLSFSVKA

SEQ ID NO: 47 - DNA, 19 bp, Artificial
  Synthetic
  misc_feature (1)..(1): Atto532 attached
ggagctcagactggcacgc

SEQ ID NO: 48 - DNA, 83 bp, Artificial; identical to SEQ ID NO: 23
  Synthetic

SEQ ID NO: 49 - DNA, 21 bp, Artificial
  Synthetic
  misc_feature (1)..(2): D-nucleotide
  misc_feature (3)..(21): L-nucleotide
ggggagctcagactggcacgc

SEQ ID NO: 50 - DNA, 1056 bp, Artificial
  Synthetic
atgattgtgctgtttgtggattttgattatttttatgcccaggtggaagaagttctgaatccgagcctgaaaggtaaaccggttgttgtttgtgtttttagcggtcgctttgaagatagcggtgcagttgcaaccgccaattatgaagcccgtaaatttggtgttaaagccggtattccgattgttgaagccaaaaaaattctgccgaatgcagtttatctgccgatgcgcaaagaagtttatcagcaggttagcagccgtattatgaatctgctgcgcgaatatagcgaaaaaattgaaattgccagcattgatgaagcctatctggatattagcgataaagtgcgcgattatcgcgaagcatataatctgggcctggaaattaaaaataaaatcctggaaaaagaaaaaattaccgtgaccgtgggcattagcaaaaataaagtgtttgccaaaattgcagcagatatggcaaaaccgaatggcattaaagtgattgatgatgaagaagtgaaacgtctgattcgcgaactggatattgcagatgttccgggtattggcaatattaccgcagaaaaactgaaaaaactgggcattaataaactggttgataccctgagcattgaatttgataaactgaaaggcatgattggtgaagcgaaagccaaatatctgattagcctggcacgtgatgaatataatgaaccgattcgtacccgtgttcgtaaaagcattggtcgtattgtgaccatgaaacgcaatagccgtaatctggaagaaattaaaccgtacctgtttcgtgcaattgaagaaagctattataaactggataaacgcattccgaaagccattcatgttgttgcagttaccgaagatctggatattgttagccgtggtcgtacctttccgcatggtattagcaaagaaaccgcctatagcgaaagcgttaaactgctgcagaaaatcctggaagaagatgaacgtaaaattcgtcgtattggtgtgcgctttagcaaatttattgaagccattggcctggataaattttttgatacc

SEQ ID NO: 51 - protein, 368 aa, Artificial
  Synthetic
MASAWSHPQFEKSGMIVLFVDFDYFYAQVEEVLNPSLKGKPVVVCVFSGRFEDSGAVATANYEARKFGVKAGIPIVEAKKILPNAVYLPMRKEVYQQVSSRIMNLLREYSEKIEIASIDEAYLDISDKVRDYREAYNLGLEIKNKILEKEKITVTVGISKNKVFAKIAADMAKPNGIKVIDDEEVKRLIRELDIADVPGIGNITAEKLKKLGINKLVDTLSIEFDKLKGMIGEAKAKYLISLARDEYNEPIRTRVRKSIGRIVTMKRNSRNLEEIKPYLFRAIEESYYKLDKRIPKAIHVVAVTEDLDIVSRGRTFPHGISKETAYSESVKLLQKILEEDERKIRRIGVRFSKFIEAIGLDKFFDTGS

SEQ ID NO: 52 - DNA, 59 bp, Artificial
  Synthetic
caaaaataaagtgtttgccaaaattgcatgcgatatggcaaaaccgaatggcattaaag

SEQ ID NO: 53 - DNA, 59 bp, Artificial
  Synthetic
ctttaatgccattcggttttgccatatcgcatgcaattttggcaaacactttatttttg

SEQ ID NO: 54 - DNA, 51 bp, Artificial
  Synthetic
tgaaaaaactgggcattaataaactgtgtgataccctgagcattgaatttg

SEQ ID NO: 55 - DNA, 51 bp, Artificial
  Synthetic
caaattcaatgctcagggtatcacacagtttattaatgcccagttttttca

SEQ ID NO: 56 - DNA, 39 bp, Artificial
  Synthetic
tgaaaggtaaaccggttgttgtttctgtttttagcggtc

SEQ ID NO: 57 - DNA, 39 bp, Artificial
  Synthetic
gaccgctaaaaacagaaacaacaaccggtttacctttca

SEQ ID NO: 58 - DNA, 46 bp, Artificial
  Synthetic
atgcgcaaagaagtttatcagcaggtttgtagccgtattatgaatc

SEQ ID NO: 59 - DNA, 46 bp, Artificial
  Synthetic
gattcataatacggctacaaacctgctgataaacttctttgcgcat

SEQ ID NO: 60 - DNA, 43 bp, Artificial
  Synthetic
aagtttatcagcaggttagctgtcgtattatgaatctgctgcg

SEQ ID NO: 61 - DNA, 43 bp, Artificial
  Synthetic
cgcagcagattcataatacgacagctaacctgctgataaactt

SEQ ID NO: 62 - DNA, 51 bp, Artificial
  Synthetic
attatgaatctgctgcgcgaatattgtgaaaaaattgaaattgccagcatt

SEQ ID NO: 63 - DNA, 51 bp, Artificial
  Synthetic
aatgctggcaatttcaattttttcacaatattcgcgcagcagattcataat

SEQ ID NO: 64 - DNA, 36 bp, Artificial
  Synthetic
  misc_feature (1)..(1): Phosphate attached
agcggctcttcgatgattgtgctgtttgtggatttt

SEQ ID NO: 65 - DNA, 36 bp, Artificial
  Synthetic
  misc_feature (1)..(1): Phosphate attached
agcggctcttcggcatgcaattttggcaaacacttt

SEQ ID NO: 66 - DNA, 27 bp, Artificial
  Synthetic
  misc_feature (1)..(1): Phosphate attached
agcggctcttcgtgcatcacgggagat

SEQ ID NO: 67 - DNA, 42 bp, Artificial
  Synthetic
  misc_feature (1)..(1): Phosphate attached
agcggctcttcgcccttgaagctgccacaaggcaggaacgtt

SEQ ID NO: 68 - protein, 154 aa, Artificial
  Synthetic
  MISC_FEATURE (154)..(154): Thioester
MIVLFVDFDYFYAQVEEVLNPSLKGKPVVVCVFSGRFEDSGAVATANYEARKFGVKAGIPIVEAKKILPNAVYLPMRKEVYQQVSSRIMNLLREYSEKIEIASIDEAYLDISDKVRDYREAYNLGLEIKNKILEKEKITVTVGISKNKVFAKIA

SEQ ID NO: 69 - DNA, 36 bp, Artificial
  Synthetic
  misc_feature (1)..(1): Phosphate attached
agcggctcttcgatgggagggaaatcaaacggggaa

SEQ ID NO: 70 - DNA, 36 bp, Artificial
  Synthetic
  misc_feature (1)..(1): Phosphate attached
agcggctcttcggcacaaagctttgaagagcttgtc

SEQ ID NO: 71 - DNA, 42 bp, Artificial
  Synthetic
  misc_feature (1)..(1): Phosphate attached
agcggctcttcgtgcgatatggcaaaaccgaatggcattaaa

SEQ ID NO: 72 - DNA, 40 bp, Artificial
  Synthetic
  misc_feature (1)..(1): Phosphate attached
agcggctcttcgcccttaggtatcaaaaaatttatccagg

SEQ ID NO: 73 - protein, 198 aa, Artificial
  Synthetic
CDMAKPNGIKVIDDEEVKRLIRELDIADVPGIGNITAEKLKKLGINKLVDTLSIEFDKLKGMIGEAKAKYLISLARDEYNEPIRTRVRKSIGRIVTMKRNSRNLEEIKPYLFRAIEESYYKLDKRIPKAIHVVAVTEDLDIVSRGRTFPHGISKETAYSESVKLLQKILEEDERKIRRIGVRFSKFIEAIGLDKFFDT

SEQ ID NO: 74 - DNA, 36 bp, Artificial
  Synthetic
  misc_feature (1)..(1): Phosphate attached
agcggctcttcgtgtgataccctgagcattgaattt

SEQ ID NO: 75 - protein, 150 aa, Artificial
  Synthetic
CDTLSIEFDKLKGMIGEAKAKYLISLARDEYNEPIRTRVRKSIGRIVTMKRNSRNLEEIKPYLFRAIEESYYKLDKRIPKAIHVVAVTEDLDIVSRGRTFPHGISKETAYSESVKLLQKILEEDERKIRRIGVRFSKFIEAIGLDKFFDT

SEQ ID NO: 76 - DNA, 36 bp, Artificial
  Synthetic
  misc_feature (1)..(1): Phosphate attached
agcggctcttcgatggcagatatggcaaaaccgaat

SEQ ID NO: 77 - DNA, 36 bp, Artificial
  Synthetic
  misc_feature (1)..(1): Phosphate attached
agcggctcttcggcacagtttattaatgcccagttt

SEQ ID NO: 78 - protein, 48 aa, Artificial
  Synthetic
  MISC_FEATURE (48)..(48): Thioester
ADMAKPNGIKVIDDEEVKRLIRELDIADVPGIGNITAEKLKKLGINKL

SEQ ID NO: 79 - DNA, 38 bp, Artificial; identical to SEQ ID NO: 24
  Synthetic

SEQ ID NO: 80 - DNA, 20 bp, Artificial
  Synthetic
gtggaaccgacaacttgtgc

SEQ ID NO: 81 - protein, 53 aa, Artificial
  Synthetic
  MISC_FEATURE (53)..(53): NH2
RTFPHGISKETAYSESVKLLQKILEEDERKIRRIGVRFSKFIEAIGLDKFFDT

SEQ ID NO: 82 - protein, 97 aa, Artificial
  Synthetic
  MISC_FEATURE (1)..(1): Boc attached
VDTLSIEFDKLKGMIGEAKAKYLISLARDEYNEPIRTRVRKSIGRIVTMKRNSRNLEEIKPYLFRAIEESYYKLDKRIPKAIHVVAVTEDLDIVSRG

SEQ ID NO: 83 - protein, 150 aa, Artificial
  Synthetic
  MISC_FEATURE (150)..(150): NH2
VDTLSIEFDKLKGMIGEAKAKYLISLARDEYNEPIRTRVRKSIGRIVTMKRNSRNLEEIKPYLFRAIEESYYKLDKRIPKAIHVVAVTEDLDIVSRGRTFPHGISKETAYSESVKLLQKILEEDERKIRRIGVRFSKFIEAIGLDKFFDT

SEQ ID NO: 84 - protein, 47 aa, Artificial
  Synthetic
  MISC_FEATURE (1)..(1): Z group attached
  MISC_FEATURE (47)..(47): benzyl-thioester
CDMAKPNGIKVIDDEEVKRLIRELDIADVPGIGNITAEKLKKLGINK

SEQ ID NO: 85 - protein, 78 aa, Artificial
  Synthetic
  MISC_FEATURE (78)..(78): SMe attached
RKEVYQQVSSRIMNLLREYSEKIEIASIDEAYLDISDKVRDYREAYNLGLEIKNKILEKEKITVTVGISKNKVFAKIA

SEQ ID NO: 86 - protein, 76 aa, Artificial
  Synthetic
  MISC_FEATURE (1)..(1): Ac attached
  MISC_FEATURE (76)..(76): 4-guanidinphenol attached
MIVLFVDFDYFYAQVEEVLNPSLKGKPVVVCVFSGRFEDSGAVATANYEARKFGVKAGIPIVEAKKILPNAVYLPM

SEQ ID NO: 87 - protein, 198 aa, Artificial
  Synthetic
CDMAKPNGIKVIDDEEVKRLIRELDIADVPGIGNITAEKLKKLGINKLCDTLSIEFDKLKGMIGEAKAKYLISLARDEYNEPIRTRVRKSIGRIVTMKRNSRNLEEIKPYLFRAIEESYYKLDKRIPKAIHVVAVTEDLDIVSRGRTFPHGISKETAYSESVKLLQKILEEDERKIRRIGVRFSKFIEAIGLDKFFDT

SEQ ID NO: 88 - protein, 154 aa, Artificial; identical to SEQ ID NO: 68
  Synthetic
  MISC_FEATURE (1)..(1): Ac attached
  MISC_FEATURE (154)..(154): SMe attached

SEQ ID NO: 89 - protein, 352 aa, Artificial
  Synthetic
MIVLFVDFDYFYAQVEEVLNPSLKGKPVVVCVFSGRFEDSGAVATANYEARKFGVKAGIPIVEAKKILPNCVYLPMRKEVYQQVSSRIMNLLREYSEKIEIASIDEAYLDISDKVRDYREAYNLGLEIKNKILEKEKITVTVGISKNKVFAKIAADMAKPNGIKVIDDEEVKRLIRELDIADVPGIGNITAEKLKKLGINKLVDTLSIEFDKLKGMIGEAKAKYLISLARDEYNEPIRTRVRKSIGRIVTMKRNSRNLEEIKPYLFRAIEESYYKLDKRIPKAIHVVAVTEDLDIVSRGRTFPHGISKETAYSESVKLLQKILEEDERKIRRIGVRFSKFIEAIGLDKFFDT

SEQ ID NO: 90 - protein, 352 aa, Artificial
  Synthetic
MIVLFVDFDYFYAQVEEVLNPSLKGKPVVVCVFSGRFEDSGAVATANYEARKFGVKAGIPIVEAKKILPNAVYLPGRKEVYQQVSSRIMNLLREYSEKIEIASIDEAYLDISDKVRDYREAYNLGLEIKNKILEKEKITVTVGISKNKVFAKIAADMAKPNGIKVIDDEEVKRLIRELDIADVPGIGNITAEKLKKLGINKLVDTLSIEFDKLKGMIGEAKAKYLISLARDEYNEPIRTRVRKSIGRIVTMKRNSRNLEEIKPYLFRAIEESYYKLDKRIPKAIHVVAVTEDLDIVSRGRTFPHGISKETAYSESVKLLQKILEEDERKIRRIGVRFSKFIEAIGLDKFFDT

SEQ ID NO: 91 - protein, 352 aa, Artificial
  Synthetic
MIVLFVDFDYFYAQVEEVLNPSLKGKPVVVCVFSGRFEDSGAVATANYEARKFGVKAGIPIVEAKKILPNAVYLPARKEVYQQVSSRIMNLLREYSEKIEIASIDEAYLDISDKVRDYREAYNLGLEIKNKILEKEKITVTVGISKNKVFAKIAADMAKPNGIKVIDDEEVKRLIRELDIADVPGIGNITAEKLKKLGINKLVDTLSIEFDKLKGMIGEAKAKYLISLARDEYNEPIRTRVRKSIGRIVTMKRNSRNLEEIKPYLFRAIEESYYKLDKRIPKAIHVVAVTEDLDIVSRGRTFPHGISKETAYSESVKLLQKILEEDERKIRRIGVRFSKFIEAIGLDKFFDT

SEQ ID NO: 92 - protein, 352 aa, Artificial
  Synthetic
MIVLFVDFDYFYAQVEEVLNPSLKGKPVVVCVFSGRFEDSGAVATANYEARKFGVKAGIPIVEAKKCLPNAVYLPMRKEVYQQVSSRIMNLLREYSEKIEIASIDEAYLDISDKVRDYREAYNLGLEIKNKILEKEKITVTVGISKNKVFAKIAADMAKPNGIKVIDDEEVKRLIRELDIADVPGIGNITAEKLKKLGINKLVDTLSIEFDKLKGMIGEAKAKYLISLARDEYNEPIRTRVRKSIGRIVTMKRNSRNLEEIKPYLFRAIEESYYKLDKRIPKAIHVVAVTEDLDIVSRGRTFPHGISKETAYSESVKLLQKILEEDERKIRRIGVRFSKFIEAIGLDKFFDT

SEQ ID NO: 93 - protein, 352 aa, Artificial
  Synthetic
MIVLFVDFDYFYAQVEEVLNPSLKGKPVVVCVFSGRFEDSGAVATANYEARKFGVKAGIPIVEAKKILPNAVYLPMRKEVYQQVSGRIMNLLREYSEKIEIASIDEAYLDISDKVRDYREAYNLGLEIKNKILEKEKITVTVGISKNKVFAKIAADMAKPNGIKVIDDEEVKRLIRELDIADVPGIGNITAEKLKKLGINKLVDTLSIEFDKLKGMIGEAKAKYLISLARDEYNEPIRTRVRKSIGRIVTMKRNSRNLEEIKPYLFRAIEESYYKLDKRIPKAIHVVAVTEDLDIVSRGRTFPHGISKETAYSESVKLLQKILEEDERKIRRIGVRFSKFIEAIGLDKFFDT

SEQ ID NO: 94 - protein, 352 aa, Artificial
  Synthetic
MIVLFVDFDYFYAQVEEVLNPSLKGKPVVVCVFSGRFEDSGAVATANYEARKFGVKAGIPIVEAKKILPNCVYLPMRKEVYQQVSSRIMNLLREYSEKIEIASIDEAYLDISDKVRDYREAYNLGLEIKNKILEKEKITVTVGISKNKVFAKIACDMAKPNGIKVIDDEEVKRLIRELDIADVPGIGNITAEKLKKLGINKLCDTLSIEFDKLKGMIGEAKAKYLISLARDEYNEPIRTRVRKSIGRIVTMKRNSRNLEEIKPYLFRAIEESYYKLDKRIPKAIHVVAVTEDLDIVSRGRTFPHGISKETAYSESVKLLQKILEEDERKIRRIGVRFSKFIEAIGLDKFFDT

SEQ ID NO: 95 - protein, 352 aa, Artificial
  Synthetic
MIVLFVDFDYFYAQVEEVLNPSLKGKPVVVCVFSGRFEDSGAVATANYEARKFGVKAGIPIVEAKKILPNAVYLPMRKEVYQQVSCRIMNLLREYSEKIEIASIDEAYLDISDKVRDYREAYNLGLEIKNKILEKEKITVTVGISKNKVFAKIACDMAKPNGIKVIDDEEVKRLIRELDIADVPGIGNITAEKLKKLGINKLCDTLSIEFDKLKGMIGEAKAKYLISLARDEYNEPIRTRVRKSIGRIVTMKRNSRNLEEIKPYLFRAIEESYYKLDKRIPKAIHVVAVTEDLDIVSRGRTFPHGISKETAYSESVKLLQKILEEDERKIRRIGVRFSKFIEAIGLDKFFDT

SEQ ID NO: 96 - protein, 352 aa, Artificial
  Synthetic
MIVLFVDFDYFYAQVEEVLNPSLKGKPVVVSVFSGRFEDSGAVATANYEARKFGVKAGIPIVEAKKILPNAVYLPMRKEVYQQVSSRIMNLLREYSEKIEIASIDEAYLDISDKVRDYREAYNLGLEIKNKILEKEKITVTVGISKNKVFAKIACDMAKPNGIKVIDDEEVKRLIRELDIADVPGIGNITAEKLKKLGINKLCDTLSIEFDKLKGMIGEAKAKYLISLARDEYNEPIRTRVRKSIGRIVTMKRNSRNLEEIKPYLFRAIEESYYKLDKRIPKAIHVVAVTEDLDIVSRGRTFPHGISKETAYSESVKLLQKILEEDERKIRRIGVRFSKFIEAIGLDKFFDT

SEQ ID NO: 97 - protein, 352 aa, Artificial
  Synthetic
MIVLFVDFDYFYAQVEEVLNPSLKGKPVVVCVFSGRFEDSGAVATANYEARKFGVKAGIPIVEAKKILPNAVYLPGRKEVYQQVSSRIMNLLREYSEKIEIASIDEAYLDISDKVRDYREAYNLGLEIKNKILEKEKITVTVGISKNKVFAKIACDMAKPNGIKVIDDEEVKRLIRELDIADVPGIGNITAEKLKKLGINKLCDTLSIEFDKLKGMIGEAKAKYLISLARDEYNEPIRTRVRKSIGRIVTMKRNSRNLEEIKPYLFRAIEESYYKLDKRIPKAIHVVAVTEDLDIVSRGRTFPHGISKETAYSESVKLLQKILEEDERKIRRIGVRFSKFIEAIGLDKFFDT

SEQ ID NO: 98 - protein, 352 aa, Artificial
  Synthetic
MIVLFVDFDYFYAQVEEVLNPSLKGKPVVVCVFSGRFEDSGAVATANYEARKFGVKAGIPIVEAKKILPNAVYLPARKEVYQQVSSRIMNLLREYSEKIEIASIDEAYLDISDKVRDYREAYNLGLEIKNKILEKEKITVTVGISKNKVFAKIACDMAKPNGIKVIDDEEVKRLIRELDIADVPGIGNITAEKLKKLGINKLCDTLSIEFDKLKGMIGEAKAKYLISLARDEYNEPIRTRVRKSIGRIVTMKRNSRNLEEIKPYLFRAIEESYYKLDKRIPKAIHVVAVTEDLDIVSRGRTFPHGISKETAYSESVKLLQKILEEDERKIRRIGVRFSKFIEAIGLDKFFDT

SEQ ID NO: 99 - protein, 352 aa, Artificial
  Synthetic
MIVLFVDFDYFYAQVEEVLNPSLKGKPVVVCVFSGRFEDSGAVATANYEARKFGVKAGIPIVEAKKCLPNAVYLPMRKEVYQQVSSRIMNLLREYSEKIEIASIDEAYLDISDKVRDYREAYNLGLEIKNKILEKEKITVTVGISKNKVFAKIACDMAKPNGIKVIDDEEVKRLIRELDIADVPGIGNITAEKLKKLGINKLCDTLSIEFDKLKGMIGEAKAKYLISLARDEYNEPIRTRVRKSIGRIVTMKRNSRNLEEIKPYLFRAIEESYYKLDKRIPKAIHVVAVTEDLDIVSRGRTFPHGISKETAYSESVKLLQKILEEDERKIRRIGVRFSKFIEAIGLDKFFDT

SEQ ID NO: 100 - protein, 352 aa, Artificial
  Synthetic
MIVLFVDFDYFYAQVEEVLNPSLKGKPVVVCVFSGRFEDSGAVATANYEARKFGVKAGIPIVEAKKILPNAVYLPMRKEVYQQVSGRIMNLLREYSEKIEIASIDEAYLDISDKVRDYREAYNLGLEIKNKILEKEKITVTVGISKNKVFAKIACDMAKPNGIKVIDDEEVKRLIRELDIADVPGIGNITAEKLKKLGINKLCDTLSIEFDKLKGMIGEAKAKYLISLARDEYNEPIRTRVRKSIGRIVTMKRNSRNLEEIKPYLFRAIEESYYKLDKRIPKAIHVVAVTEDLDIVSRGRTFPHGISKETAYSESVKLLQKILEEDERKIRRIGVRFSKFIEAIGLDKFFDT

SEQ ID NO: 101 - protein, 352 aa, Artificial
  Synthetic
MIVLFVDFDYFYAQVEEVLNPSLKGKPVVVCVFSGRFEDSGAVATANYEARKFGVKAGIPIVEAKKILPNAVYLPMRKEVYQQVSSRIMNLLREYGEKIEIASIDEAYLDISDKVRDYREAYNLGLEIKNKILEKEKITVTVGISKNKVFAKIACDMAKPNGIKVIDDEEVKRLIRELDIADVPGIGNITAEKLKKLGINKLCDTLSIEFDKLKGMIGEAKAKYLISLARDEYNEPIRTRVRKSIGRIVTMKRNSRNLEEIKPYLFRAIEESYYKLDKRIPKAIHVVAVTEDLDIVSRGRTFPHGISKETAYSESVKLLQKILEEDERKIRRIGVRFSKFIEAIGLDKFFDT

SEQ ID NO: 102 - protein, 352 aa, Artificial
  Synthetic
MIVLFVDFDYFYAQVEEVLNPSLKGKPVVVCVFSGRFEDSGAVATANYEARKFGVKAGIPIVEAKKILPNCVYLPMRKEVYQQVSSRIMNLLREYSEKIEIASIDEAYLDISDKVRDYREAYNLGLEIKNKILEKEKITVTVGISKNKVFAKIACDMAKPNGIKVIDDEEVKRLIRELDIADVPGIGNITAEKLKKLGINKLVDTLSIEFDKLKGMIGEAKAKYLISLARDEYNEPIRTRVRKSIGRIVTMKRNSRNLEEIKPYLFRAIEESYYKLDKRIPKAIHVVAVTEDLDIVSRGRTFPHGISKETAYSESVKLLQKILEEDERKIRRIGVRFSKFIEAIGLDKFFDT

SEQ ID NO: 103 - protein, 352 aa, Artificial
  Synthetic
MIVLFVDFDYFYAQVEEVLNPSLKGKPVVVCVFSGRFEDSGAVATANYEARKFGVKAGIPIVEAKKILPNAVYLPMRKEVYQQVSCRIMNLLREYSEKIEIASIDEAYLDISDKVRDYREAYNLGLEIKNKILEKEKITVTVGISKNKVFAKIACDMAKPNGIKVIDDEEVKRLIRELDIADVPGIGNITAEKLKKLGINKLVDTLSIEFDKLKGMIGEAKAKYLISLARDEYNEPIRTRVRKSIGRIVTMKRNSRNLEEIKPYLFRAIEESYYKLDKRIPKAIHVVAVTEDLDIVSRGRTFPHGISKETAYSESVKLLQKILEEDERKIRRIGVRFSKFIEAIGLDKFFDT

SEQ ID NO: 104 - protein, 352 aa, Artificial
  Synthetic
MIVLFVDFDYFYAQVEEVLNPSLKGKPVVVSVFSGRFEDSGAVATANYEARKFGVKAGIPIVEAKKILPNAVYLPMRKEVYQQVSSRIMNLLREYSEKIEIASIDEAYLDISDKVRDYREAYNLGLEIKNKILEKEKITVTVGISKNKVFAKIACDMAKPNGIKVIDDEEVKRLIRELDIADVPGIGNITAEKLKKLGINKLVDTLSIEFDKLKGMIGEAKAKYLISLARDEYNEPIRTRVRKSIGRIVTMKRNSRNLEEIKPYLFRAIEESYYKLDKRIPKAIHVVAVTEDLDIVSRGRTFPHGISKETAYSESVKLLQKILEEDERKIRRIGVRFSKFIEAIGLDKFFDT

SEQ ID NO: 105 - protein, 352 aa, Artificial
  Synthetic
MIVLFVDFDYFYAQVEEVLNPSLKGKPVVVCVFSGRFEDSGAVATANYEARKFGVKAGIPIVEAKKILPNAVYLPGRKEVYQQVSSRIMNLLREYSEKIEIASIDEAYLDISDKVRDYREAYNLGLEIKNKILEKEKITVTVGISKNKVFAKIACDMAKPNGIKVIDDEEVKRLIRELDIADVPGIGNITAEKLKKLGINKLVDTLSIEFDKLKGMIGEAKAKYLISLARDEYNEPIRTRVRKSIGRIVTMKRNSRNLEEIKPYLFRAIEESYYKLDKRIPKAIHVVAVTEDLDIVSRGRTFPHGISKETAYSESVKLLQKILEEDERKIRRIGVRFSKFIEAIGLDKFFDT

SEQ ID NO: 106 - protein, 352 aa, Artificial
  Synthetic
MIVLFVDFDYFYAQVEEVLNPSLKGKPVVVCVFSGRFEDSGAVATANYEARKFGVKAGIPIVEAKKILPNAVYLPARKEVYQQVSSRIMNLLREYSEKIEIASIDEAYLDISDKVRDYREAYNLGLEIKNKILEKEKITVTVGISKNKVFAKIACDMAKPNGIKVIDDEEVKRLIRELDIADVPGIGNITAEKLKKLGINKLVDTLSIEFDKLKGMIGEAKAKYLISLARDEYNEPIRTRVRKSIGRIVTMKRNSRNLEEIKPYLFRAIEESYYKLDKRIPKAIHVVAVTEDLDIVSRGRTFPHGISKETAYSESVKLLQKILEEDERKIRRIGVRFSKFIEAIGLDKFFDT

SEQ ID NO: 107 - protein, 352 aa, Artificial
  Synthetic
MIVLFVDFDYFYAQVEEVLNPSLKGKPVVVCVFSGRFEDSGAVATANYEARKFGVKAGIPIVEAKKCLPNAVYLPMRKEVYQQVSSRIMNLLREYSEKIEIASIDEAYLDISDKVRDYREAYNLGLEIKNKILEKEKITVTVGISKNKVFAKIACDMAKPNGIKVIDDEEVKRLIRELDIADVPGIGNITAEKLKKLGINKLVDTLSIEFDKLKGMIGEAKAKYLISLARDEYNEPIRTRVRKSIGRIVTMKRNSRNLEEIKPYLFRAIEESYYKLDKRIPKAIHVVAVTEDLDIVSRGRTFPHGISKETAYSESVKLLQKILEEDERKIRRIGVRFSKFIEAIGLDKFFDT

SEQ ID NO: 108 - protein, 352 aa, Artificial
  Synthetic
MIVLFVDFDYFYAQVEEVLNPSLKGKPVVVCVFSGRFEDSGAVATANYEARKFGVKAGIPIVEAKKILPNAVYLPMRKEVYQQVSGRIMNLLREYSEKIEIASIDEAYLDISDKVRDYREAYNLGLEIKNKILEKEKITVTVGISKNKVFAKIACDMAKPNGIKVIDDEEVKRLIRELDIADVPGIGNITAEKLKKLGINKLVDTLSIEFDKLKGMIGEAKAKYLISLARDEYNEPIRTRVRKSIGRIVTMKRNSRNLEEIKPYLFRAIEESYYKLDKRIPKAIHVVAVTEDLDIVSRGRTFPHGISKETAYSESVKLLQKILEEDERKIRRIGVRFSKFIEAIGLDKFFDT

SEQ ID NO: 109 - protein, 352 aa, Artificial
  Synthetic
MIVLFVDFDYFYAQVEEVLNPSLKGKPVVVCVFSGRFEDSGAVATANYEARKFGVKAGIPIVEAKKILPNAVYLPMRKEVYQQVSSRIMNLLREYGEKIEIASIDEAYLDISDKVRDYREAYNLGLEIKNKILEKEKITVTVGISKNKVFAKIACDMAKPNGIKVIDDEEVKRLIRELDIADVPGIGNITAEKLKKLGINKLVDTLSIEFDKLKGMIGEAKAKYLISLARDEYNEPIRTRVRKSIGRIVTMKRNSRNLEEIKPYLFRAIEESYYKLDKRIPKAIHVVAVTEDLDIVSRGRTFPHGISKETAYSESVKLLQKILEEDERKIRRIGVRFSKFIEAIGLDKFFDT

SEQ ID NO: 110 - protein, 352 aa, Artificial
  Synthetic
MIVLFVDFDYFYAQVEEVLNPSLKGKPVVVCVFSGRFEDSGAVATANYEARKFGVKAGIPIVEAKKILPNCVYLPMRKEVYQQVSSRIMNLLREYSEKIEIASIDEAYLDISDKVRDYREAYNLGLEIKNKILEKEKITVTVGISKNKVFAKIAADMAKPNGIKVIDDEEVKRLIRELDIADVPGIGNITAEKLKKLGINKLCDTLSIEFDKLKGMIGEAKAKYLISLARDEYNEPIRTRVRKSIGRIVTMKRNSRNLEEIKPYLFRAIEESYYKLDKRIPKAIHVVAVTEDLDIVSRGRTFPHGISKETAYSESVKLLQKILEEDERKIRRIGVRFSKFIEAIGLDKFFDT

SEQ ID NO: 111 - protein, 352 aa, Artificial
  Synthetic
MIVLFVDFDYFYAQVEEVLNPSLKGKPVVVCVFSGRFEDSGAVATANYEARKFGVKAGIPIVEAKKILPNAVYLPMRKEVYQQVSCRIMNLLREYSEKIEIASIDEAYLDISDKVRDYREAYNLGLEIKNKILEKEKITVTVGISKNKVFAKIAADMAKPNGIKVIDDEEVKRLIRELDIADVPGIGNITAEKLKKLGINKLCDTLSIEFDKLKGMIGEAKAKYLISLARDEYNEPIRTRVRKSIGRIVTMKRNSRNLEEIKPYLFRAIEESYYKLDKRIPKAIHVVAVTEDLDIVSRGRTFPHGISKETAYSESVKLLQKILEEDERKIRRIGVRFSKFIEAIGLDKFFDT

SEQ ID NO: 112 - protein, 352 aa, Artificial
  Synthetic
MIVLFVDFDYFYAQVEEVLNPSLKGKPVVVSVFSGRFEDSGAVATANYEARKFGVKAGIPIVEAKKILPNAVYLPMRKEVYQQVSSRIMNLLREYSEKIEIASIDEAYLDISDKVRDYREAYNLGLEIKNKILEKEKITVTVGISKNKVFAKIAADMAKPNGIKVIDDEEVKRLIRELDIADVPGIGNITAEKLKKLGINKLCDTLSIEFDKLKGMIGEAKAKYLISLARDEYNEPIRTRVRKSIGRIVTMKRNSRNLEEIKPYLFRAIEESYYKLDKRIPKAIHVVAVTEDLDIVSRGRTFPHGISKETAYSESVKLLQKILEEDERKIRRIGVRFSKFIEAIGLDKFFDT

SEQ ID NO: 113 - protein, 352 aa, Artificial
  Synthetic
MIVLFVDFDYFYAQVEEVLNPSLKGKPVVVCVFSGRFEDSGAVATANYEARKFGVKAGIPIVEAKKILPNAVYLPGRKEVYQQVSSRIMNLLREYSEKIEIASIDEAYLDISDKVRDYREAYNLGLEIKNKILEKEKITVTVGISKNKVFAKIAADMAKPNGIKVIDDEEVKRLIRELDIADVPGIGNITAEKLKKLGINKLCDTLSIEFDKLKGMIGEAKAKYLISLARDEYNEPIRTRVRKSIGRIVTMKRNSRNLEEIKPYLFRAIEESYYKLDKRIPKAIHVVAVTEDLDIVSRGRTFPHGISKETAYSESVKLLQKILEEDERKIRRIGVRFSKFIEAIGLDKFFDT

SEQ ID NO: 114 - protein, 352 aa, Artificial
  Synthetic
MIVLFVDFDYFYAQVEEVLNPSLKGKPVVVCVFSGRFEDSGAVATANYEARKFGVKAGIPIVEAKKILPNAVYLPARKEVYQQVSSRIMNLLREYSEKIEIASIDEAYLDISDKVRDYREAYNLGLEIKNKILEKEKITVTVGISKNKVFAKIAADMAKPNGIKVIDDEEVKRLIRELDIADVPGIGNITAEKLKKLGINKLCDTLSIEFDKLKGMIGEAKAKYLISLARDEYNEPIRTRVRKSIGRIVTMKRNSRNLEEIKPYLFRAIEESYYKLDKRIPKAIHVVAVTEDLDIVSRGRTFPHGISKETAYSESVKLLQKILEEDERKIRRIGVRFSKFIEAIGLDKFFDT

SEQ ID NO: 115 - protein, 352 aa, Artificial
  Synthetic
MIVLFVDFDYFYAQVEEVLNPSLKGKPVVVCVFSGRFEDSGAVATANYEARKFGVKAGIPIVEAKKCLPNAVYLPMRKEVYQQVSSRIMNLLREYSEKIEIASIDEAYLDISDKVRDYREAYNLGLEIKNKILEKEKITVTVGISKNKVFAKIAADMAKPNGIKVIDDEEVKRLIRELDIADVPGIGNITAEKLKKLGINKLCDTLSIEFDKLKGMIGEAKAKYLISLARDEYNEPIRTRVRKSIGRIVTMKRNSRNLEEIKPYLFRAIEESYYKLDKRIPKAIHVVAVTEDLDIVSRGRTFPHGISKETAYSESVKLLQKILEEDERKIRRIGVRFSKFIEAIGLDKFFDT

SEQ ID NO: 116 - protein, 352 aa, Artificial
  Synthetic
MIVLFVDFDYFYAQVEEVLNPSLKGKPVVVCVFSGRFEDSGAVATANYEARKFGVKAGIPIVEAKKILPNAVYLPMRKEVYQQVSGRIMNLLREYSEKIEIASIDEAYLDISDKVRDYREAYNLGLEIKNKILEKEKITVTVGISKNKVFAKIAADMAKPNGIKVIDDEEVKRLIRELDIADVPGIGNITAEKLKKLGINKLCDTLSIEFDKLKGMIGEAKAKYLISLARDEYNEPIRTRVRKSIGRIVTMKRNSRNLEEIKPYLFRAIEESYYKLDKRIPKAIHVVAVTEDLDIVSRGRTFPHGISKETAYSESVKLLQKILEEDERKIRRIGVRFSKFIEAIGLDKFFDT

SEQ ID NO: 117 - protein, 352 aa, Artificial
  Synthetic
MIVLFVDFDYFYAQVEEVLNPSLKGKPVVVCVFSGRFEDSGAVATANYEARKFGVKAGIPIVEAKKILPNAVYLPMRKEVYQQVSSRIMNLLREYGEKIEIASIDEAYLDISDKVRDYREAYNLGLEIKNKILEKEKITVTVGISKNKVFAKIAADMAKPNGIKVIDDEEVKRLIRELDIADVPGIGNITAEKLKKLGINKLCDTLSIEFDKLKGMIGEAKAKYLISLARDEYNEPIRTRVRKSIGRIVTMKRNSRNLEEIKPYLFRAIEESYYKLDKRIPKAIHVVAVTEDLDIVSRGRTFPHGISKETAYSESVKLLQKILEEDERKIRRIGVRFSKFIEAIGLDKFFDT

SEQ ID NO: 118 - protein, 352 aa, Artificial; identical to SEQ ID NO: 104
  Synthetic

SEQ ID NO: 119 - protein, 352 aa, Artificial; identical to SEQ ID NO: 112
  Synthetic

SEQ ID NO: 120 - protein, 352 aa, Artificial; identical to SEQ ID NO: 96
  Synthetic

SEQ ID NO: 121 - protein, 349 aa, Artificial
  Synthetic
MIVLFVDFDYFYAQVEEVLNPSLKGKPVVVCVFSGRFEDSGAVATANYEARKFGVKAGIPIVEAKKILPNAVYLPMRKEVYQQVSSRIMNLLREYSEKIEIASIDEAYLDISDKVRDYREAYNLGLEIKNKILEKEKITVTVGISKNKVFAKIAADMAKPNGIKVIDDEEVKRLIRELDIADVPGIGNITAEKLKKLGINKLVDTLSIEFDKLKGMIGEAKAKYLISLARDEYNEPIRTRVRKSIGRIVTMKRNSRNLEEIKPYLFRAIEESYYKLDKRIPKAIHVVAVTEDLDIVSRGRTFPHGISKETAYSESVKLLQKILEEDERKIRRIGVRFSKFIEAIGLDKF

SEQ ID NO: 122 - protein, 349 aa, Artificial
  Synthetic
MIVLFVDFDYFYAQVEEVLNPSLKGKPVVVCVFSGRFEDSGAVATANYEARKFGVKAGIPIVEAKKILPNAVYLPMRKEVYQQVSSRIMNLLREYSEKIEIASIDEAYLDISDKVRDYREAYNLGLEIKNKILEKEKITVTVGISKNKVFAKIACDMAKPNGIKVIDDEEVKRLIRELDIADVPGIGNITAEKLKKLGINKLVDTLSIEFDKLKGMIGEAKAKYLISLARDEYNEPIRTRVRKSIGRIVTMKRNSRNLEEIKPYLFRAIEESYYKLDKRIPKAIHVVAVTEDLDIVSRGRTFPHGISKETAYSESVKLLQKILEEDERKIRRIGVRFSKFIEAIGLDKF

SEQ ID NO: 123 - protein, 349 aa, Artificial
  Synthetic
MIVLFVDFDYFYAQVEEVLNPSLKGKPVVVCVFSGRFEDSGAVATANYEARKFGVKAGIPIVEAKKILPNCVYLPMRKEVYQQVSSRIMNLLREYSEKIEIASIDEAYLDISDKVRDYREAYNLGLEIKNKILEKEKITVTVGISKNKVFAKIACDMAKPNGIKVIDDEEVKRLIRELDIADVPGIGNITAEKLKKLGINKLVDTLSIEFDKLKGMIGEAKAKYLISLARDEYNEPIRTRVRKSIGRIVTMKRNSRNLEEIKPYLFRAIEESYYKLDKRIPKAIHVVAVTEDLDIVSRGRTFPHGISKETAYSESVKLLQKILEEDERKIRRIGVRFSKFIEAIGLDKF

SEQ ID NO: 124 - protein, 349 aa, Artificial
  Synthetic
MIVLFVDFDYFYAQVEEVLNPSLKGKPVVVCVFSGRFEDSGAVATANYEARKFGVKAGIPIVEAKKILPNAVYLPMRKEVYQQVSSRIMNLLREYSEKIEIASIDEAYLDISDKVRDYREAYNLGLEIKNKILEKEKITVTVGISKNKVFAKIAADMAKPNGIKVIDDEEVKRLIRELDIADVPGIGNITAEKLKKLGINKLCDTLSIEFDKLKGMIGEAKAKYLISLARDEYNEPIRTRVRKSIGRIVTMKRNSRNLEEIKPYLFRAIEESYYKLDKRIPKAIHVVAVTEDLDIVSRGRTFPHGISKETAYSESVKLLQKILEEDERKIRRIGVRFSKFIEAIGLDKF

SEQ ID NO: 125 - protein, 349 aa, Artificial
  Synthetic
MIVLFVDFDYFYAQVEEVLNPSLKGKPVVVCVFSGRFEDSGAVATANYEARKFGVKAGIPIVEAKKILPNAVYLPMRKEVYQQVSSRIMNLLREYSEKIEIASIDEAYLDISDKVRDYREAYNLGLEIKNKILEKEKITVTVGISKNKVFAKIACDMAKPNGIKVIDDEEVKRLIRELDIADVPGIGNITAEKLKKLGINKLCDTLSIEFDKLKGMIGEAKAKYLISLARDEYNEPIRTRVRKSIGRIVTMKRNSRNLEEIKPYLFRAIEESYYKLDKRIPKAIHVVAVTEDLDIVSRGRTFPHGISKETAYSESVKLLQKILEEDERKIRRIGVRFSKFIEAIGLDKF

SEQ ID NO: 126 - protein, 349 aa, Artificial
  Synthetic
MIVLFVDFDYFYAQVEEVLNPSLKGKPVVVSVFSGRFEDSGAVATANYEARKFGVKAGIPIVEAKKILPNAVYLPMRKEVYQQVSSRIMNLLREYSEKIEIASIDEAYLDISDKVRDYREAYNLGLEIKNKILEKEKITVTVGISKNKVFAKIAADMAKPNGIKVIDDEEVKRLIRELDIADVPGIGNITAEKLKKLGINKLVDTLSIEFDKLKGMIGEAKAKYLISLARDEYNEPIRTRVRKSIGRIVTMKRNSRNLEEIKPYLFRAIEESYYKLDKRIPKAIHVVAVTEDLDIVSRGRTFPHGISKETAYSESVKLLQKILEEDERKIRRIGVRFSKFIEAIGLDKF

SEQ ID NO: 127 - protein, 349 aa, Artificial
  Synthetic
MIVLFVDFDYFYAQVEEVLNPSLKGKPVVVCVFSGRFEDSGAVATANYEARKFGVKAGIPIVEAKKILPNAVYLPMRKEVYQQVCSRIMNLLREYSEKIEIASIDEAYLDISDKVRDYREAYNLGLEIKNKILEKEKITVTVGISKNKVFAKIAADMAKPNGIKVIDDEEVKRLIRELDIADVPGIGNITAEKLKKLGINKLVDTLSIEFDKLKGMIGEAKAKYLISLARDEYNEPIRTRVRKSIGRIVTMKRNSRNLEEIKPYLFRAIEESYYKLDKRIPKAIHVVAVTEDLDIVSRGRTFPHGISKETAYSESVKLLQKILEEDERKIRRIGVRFSKFIEAIGLDKF

SEQ ID NO: 128 - protein, 349 aa, Artificial
  Synthetic
MIVLFVDFDYFYAQVEEVLNPSLKGKPVVVCVFSGRFEDSGAVATANYEARKFGVKAGIPIVEAKKILPNAVYLPMRKEVYQQVSCRIMNLLREYSEKIEIASIDEAYLDISDKVRDYREAYNLGLEIKNKILEKEKITVTVGISKNKVFAKIAADMAKPNGIKVIDDEEVKRLIRELDIADVPGIGNITAEKLKKLGINKLVDTLSIEFDKLKGMIGEAKAKYLISLARDEYNEPIRTRVRKSIGRIVTMKRNSRNLEEIKPYLFRAIEESYYKLDKRIPKAIHVVAVTEDLDIVSRGRTFPHGISKETAYSESVKLLQKILEEDERKIRRIGVRFSKFIEAIGLDKF

SEQ ID NO: 129 - protein, 349 aa, Artificial
  Synthetic
MIVLFVDFDYFYAQVEEVLNPSLKGKPVVVCVFSGRFEDSGAVATANYEARKFGVKAGIPIVEAKKILPNAVYLPMRKEVYQQVSSRIMNLLREYCEKIEIASIDEAYLDISDKVRDYREAYNLGLEIKNKILEKEKITVTVGISKNKVFAKIAADMAKPNGIKVIDDEEVKRLIRELDIADVPGIGNITAEKLKKLGINKLVDTLSIEFDKLKGMIGEAKAKYLISLARDEYNEPIRTRVRKSIGRIVTMKRNSRNLEEIKPYLFRAIEESYYKLDKRIPKAIHVVAVTEDLDIVSRGRTFPHGISKETAYSESVKLLQKILEEDERKIRRIGVRFSKFIEAIGLDKF

SEQ ID NO: 130 - protein, 349 aa, Artificial
  Synthetic
MIVLFVDFDYFYAQVEEVLNPSLKGKPVVVCVFSGRFEDSGAVATANYEARKFGVKAGIPIVEAKKILPNCVYLPMRKEVYQQVSSRIMNLLREYSEKIEIASIDEAYLDISDKVRDYREAYNLGLEIKNKILEKEKITVTVGISKNKVFAKIAADMAKPNGIKVIDDEEVKRLIRELDIADVPGIGNITAEKLKKLGINKLVDTLSIEFDKLKGMIGEAKAKYLISLARDEYNEPIRTRVRKSIGRIVTMKRNSRNLEEIKPYLFRAIEESYYKLDKRIPKAIHVVAVTEDLDIVSRGRTFPHGISKETAYSESVKLLQKILEEDERKIRRIGVRFSKFIEAIGLDKF

SEQ ID NO: 131 - protein, 349 aa, Artificial
  Synthetic
MIVLFVDFDYFYAQVEEVLNPSLKGKPVVVCVFSGRFEDSGAVATANYEARKFGVKAGIPIVEAKKILPNAVYLPGRKEVYQQVSSRIMNLLREYSEKIEIASIDEAYLDISDKVRDYREAYNLGLEIKNKILEKEKITVTVGISKNKVFAKIAADMAKPNGIKVIDDEEVKRLIRELDIADVPGIGNITAEKLKKLGINKLVDTLSIEFDKLKGMIGEAKAKYLISLARDEYNEPIRTRVRKSIGRIVTMKRNSRNLEEIKPYLFRAIEESYYKLDKRIPKAIHVVAVTEDLDIVSRGRTFPHGISKETAYSESVKLLQKILEEDERKIRRIGVRFSKFIEAIGLDKF

SEQ ID NO: 132 - protein, 349 aa, Artificial
  Synthetic
MIVLFVDFDYFYAQVEEVLNPSLKGKPVVVCVFSGRFEDSGAVATANYEARKFGVKAGIPIVEAKKILPNAVYLPARKEVYQQVSSRIMNLLREYSEKIEIASIDEAYLDISDKVRDYREAYNLGLEIKNKILEKEKITVTVGISKNKVFAKIAADMAKPNGIKVIDDEEVKRLIRELDIADVPGIGNITAEKLKKLGINKLVDTLSIEFDKLKGMIGEAKAKYLISLARDEYNEPIRTRVRKSIGRIVTMKRNSRNLEEIKPYLFRAIEESYYKLDKRIPKAIHVVAVTEDLDIVSRGRTFPHGISKETAYSESVKLLQKILEEDERKIRRIGVRFSKFIEAIGLDKF

SEQ ID NO: 133 - protein, 349 aa, Artificial
  Synthetic
MIVLFVDFDYFYAQVEEVLNPSLKGKPVVVCVFSGRFEDSGAVATANYEARKFGVKAGIPIVEAKKCLPNAVYLPMRKEVYQQVSSRIMNLLREYSEKIEIASIDEAYLDISDKVRDYREAYNLGLEIKNKILEKEKITVTVGISKNKVFAKIAADMAKPNGIKVIDDEEVKRLIRELDIADVPGIGNITAEKLKKLGINKLVDTLSIEFDKLKGMIGEAKAKYLISLARDEYNEPIRTRVRKSIGRIVTMKRNSRNLEEIKPYLFRAIEESYYKLDKRIPKAIHVVAVTEDLDIVSRGRTFPHGISKETAYSESVKLLQKILEEDERKIRRIGVRFSKFIEAIGLDKF

SEQ ID NO: 134 - protein, 349 aa, Artificial
  Synthetic
MIVLFVDFDYFYAQVEEVLNPSLKGKPVVVCVFSGRFEDSGAVATANYEARKFGVKAGIPIVEAKKILPNAVYLPMRKEVYQQVSGRIMNLLREYSEKIEIASIDEAYLDISDKVRDYREAYNLGLEIKNKILEKEKITVTVGISKNKVFAKIAADMAKPNGIKVIDDEEVKRLIRELDIADVPGIGNITAEKLKKLGINKLVDTLSIEFDKLKGMIGEAKAKYLISLARDEYNEPIRTRVRKSIGRIVTMKRNSRNLEEIKPYLFRAIEESYYKLDKRIPKAIHVVAVTEDLDIVSRGRTFPHGISKETAYSESVKLLQKILEEDERKIRRIGVRFSKFIEAIGLDKF

SEQ ID NO: 135 - protein, 349 aa, Artificial
  Synthetic
MIVLFVDFDYFYAQVEEVLNPSLKGKPVVVCVFSGRFEDSGAVATANYEARKFGVKAGIPIVEAKKILPNCVYLPMRKEVYQQVSSRIMNLLREYSEKIEIASIDEAYLDISDKVRDYREAYNLGLEIKNKILEKEKITVTVGISKNKVFAKIACDMAKPNGIKVIDDEEVKRLIRELDIADVPGIGNITAEKLKKLGINKLCDTLSIEFDKLKGMIGEAKAKYLISLARDEYNEPIRTRVRKSIGRIVTMKRNSRNLEEIKPYLFRAIEESYYKLDKRIPKAIHVVAVTEDLDIVSRGRTFPHGISKETAYSESVKLLQKILEEDERKIRRIGVRFSKFIEAIGLDKF

SEQ ID NO: 136 - protein, 349 aa, Artificial
  Synthetic
MIVLFVDFDYFYAQVEEVLNPSLKGKPVVVCVFSGRFEDSGAVATANYEARKFGVKAGIPIVEAKKILPNAVYLPMRKEVYQQVSCRIMNLLREYSEKIEIASIDEAYLDISDKVRDYREAYNLGLEIKNKILEKEKITVTVGISKNKVFAKIACDMAKPNGIKVIDDEEVKRLIRELDIADVPGIGNITAEKLKKLGINKLCDTLSIEFDKLKGMIGEAKAKYLISLARDEYNEPIRTRVRKSIGRIVTMKRNSRNLEEIKPYLFRAIEESYYKLDKRIPKAIHVVAVTEDLDIVSRGRTFPHGISKETAYSESVKLLQKILEEDERKIRRIGVRFSKFIEAIGLDKF

SEQ ID NO: 137 - protein, 349 aa, Artificial
  Synthetic
MIVLFVDFDYFYAQVEEVLNPSLKGKPVVVSVFSGRFEDSGAVATANYEARKFGVKAGIPIVEAKKILPNAVYLPMRKEVYQQVSSRIMNLLREYSEKIEIASIDEAYLDISDKVRDYREAYNLGLEIKNKILEKEKITVTVGISKNKVFAKIACDMAKPNGIKVIDDEEVKRLIRELDIADVPGIGNITAEKLKKLGINKLCDTLSIEFDKLKGMIGEAKAKYLISLARDEYNEPIRTRVRKSIGRIVTMKRNSRNLEEIKPYLFRAIEESYYKLDKRIPKAIHVVAVTEDLDIVSRGRTFPHGISKETAYSESVKLLQKILEEDERKIRRIGVRFSKFIEAIGLDKF

SEQ ID NO: 138 - protein, 349 aa, Artificial
  Synthetic
MIVLFVDFDYFYAQVEEVLNPSLKGKPVVVCVFSGRFEDSGAVATANYEARKFGVKAGIPIVEAKKILPNAVYLPGRKEVYQQVSSRIMNLLREYSEKIEIASIDEAYLDISDKVRDYREAYNLGLEIKNKILEKEKITVTVGISKNKVFAKIACDMAKPNGIKVIDDEEVKRLIRELDIADVPGIGNITAEKLKKLGINKLCDTLSIEFDKLKGMIGEAKAKYLISLARDEYNEPIRTRVRKSIGRIVTMKRNSRNLEEIKPYLFRAIEESYYKLDKRIPKAIHVVAVTEDLDIVSRGRTFPHGISKETAYSESVKLLQKILEEDERKIRRIGVRFSKFIEAIGLDKF

SEQ ID NO: 139 - protein, 349 aa, Artificial
  Synthetic
MIVLFVDFDYFYAQVEEVLNPSLKGKPVVVCVFSGRFEDSGAVATANYEARKFGVKAGIPIVEAKKILPNAVYLPARKEVYQQVSSRIMNLLREYSEKIEIASIDEAYLDISDKVRDYREAYNLGLEIKNKILEKEKITVTVGISKNKVFAKIACDMAKPNGIKVIDDEEVKRLIRELDIADVPGIGNITAEKLKKLGINKLCDTLSIEFDKLKGMIGEAKAKYLISLARDEYNEPIRTRVRKSIGRIVTMKRNSRNLEEIKPYLFRAIEESYYKLDKRIPKAIHVVAVTEDLDIVSRGRTFPHGISKETAYSESVKLLQKILEEDERKIRRIGVRFSKFIEAIGLDKF

SEQ ID NO: 140 - protein, 349 aa, Artificial
  Synthetic
MIVLFVDFDYFYAQVEEVLNPSLKGKPVVVCVFSGRFEDSGAVATANYEARKFGVKAGIPIVEAKKCLPNAVYLPMRKEVYQQVSSRIMNLLREYSEKIEIASIDEAYLDISDKVRDYREAYNLGLEIKNKILEKEKITVTVGISKNKVFAKIACDMAKPNGIKVIDDEEVKRLIRELDIADVPGIGNITAEKLKKLGINKLCDTLSIEFDKLKGMIGEAKAKYLISLARDEYNEPIRTRVRKSIGRIVTMKRNSRNLEEIKPYLFRAIEESYYKLDKRIPKAIHVVAVTEDLDIVSRGRTFPHGISKETAYSESVKLLQKILEEDERKIRRIGVRFSKFIEAIGLDKF

SEQ ID NO: 141 - protein, 349 aa, Artificial
  Synthetic
MIVLFVDFDYFYAQVEEVLNPSLKGKPVVVCVFSGRFEDSGAVATANYEARKFGVKAGIPIVEAKKILPNAVYLPMRKEVYQQVSGRIMNLLREYSEKIEIASIDEAYLDISDKVRDYREAYNLGLEIKNKILEKEKITVTVGISKNKVFAKIACDMAKPNGIKVIDDEEVKRLIRELDIADVPGIGNITAEKLKKLGINKLCDTLSIEFDKLKGMIGEAKAKYLISLARDEYNEPIRTRVRKSIGRIVTMKRNSRNLEEIKPYLFRAIEESYYKLDKRIPKAIHVVAVTEDLDIVSRGRTFPHGISKETAYSESVKLLQKILEEDERKIRRIGVRFSKFIEAIGLDKF

SEQ ID NO: 142 - protein, 349 aa, Artificial
  Synthetic
MIVLFVDFDYFYAQVEEVLNPSLKGKPVVVCVFSGRFEDSGAVATANYEARKFGVKAGIPIVEAKKILPNAVYLPMRKEVYQQVSSRIMNLLREYGEKIEIASIDEAYLDISDKVRDYREAYNLGLEIKNKILEKEKITVTVGISKNKVFAKIACDMAKPNGIKVIDDEEVKRLIRELDIADVPGIGNITAEKLKKLGINKLCDTLSIEFDKLKGMIGEAKAKYLISLARDEYNEPIRTRVRKSIGRIVTMKRNSRNLEEIKPYLFRAIEESYYKLDKRIPKAIHVVAVTEDLDIVSRGRTFPHGISKETAYSESVKLLQKILEEDERKIRRIGVRFSKFIEAIGLDKF

SEQ ID NO: 143 - protein, 349 aa, Artificial
  Synthetic
MIVLFVDFDYFYAQVEEVLNPSLKGKPVVVCVFSGRFEDSGAVATANYEARKFGVKAGIPIVEAKKILPNAVYLPMRKEVYQQVSCRIMNLLREYSEKIEIASIDEAYLDISDKVRDYREAYNLGLEIKNKILEKEKITVTVGISKNKVFAKIACDMAKPNGIKVIDDEEVKRLIRELDIADVPGIGNITAEKLKKLGINKLVDTLSIEFDKLKGMIGEAKAKYLISLARDEYNEPIRTRVRKSIGRIVTMKRNSRNLEEIKPYLFRAIEESYYKLDKRIPKAIHVVAVTEDLDIVSRGRTFPHGISKETAYSESVKLLQKILEEDERKIRRIGVRFSKFIEAIGLDKF

SEQ ID NO: 144 - protein, 349 aa, Artificial
  Synthetic
MIVLFVDFDYFYAQVEEVLNPSLKGKPVVVSVFSGRFEDSGAVATANYEARKFGVKAGIPIVEAKKILPNAVYLPMRKEVYQQVSSRIMNLLREYSEKIEIASIDEAYLDISDKVRDYREAYNLGLEIKNKILEKEKITVTVGISKNKVFAKIACDMAKPNGIKVIDDEEVKRLIRELDIADVPGIGNITAEKLKKLGINKLVDTLSIEFDKLKGMIGEAKAKYLISLARDEYNEPIRTRVRKSIGRIVTMKRNSRNLEEIKPYLFRAIEESYYKLDKRIPKAIHVVAVTEDLDIVSRGRTFPHGISKETAYSESVKLLQKILEEDERKIRRIGVRFSKFIEAIGLDKF

SEQ ID NO: 145 - protein, 349 aa, Artificial
  Synthetic
MIVLFVDFDYFYAQVEEVLNPSLKGKPVVVCVFSGRFEDSGAVATANYEARKFGVKAGIPIVEAKKILPNAVYLPGRKEVYQQVSSRIMNLLREYSEKIEIASIDEAYLDISDKVRDYREAYNLGLEIKNKILEKEKITVTVGISKNKVFAKIACDMAKPNGIKVIDDEEVKRLIRELDIADVPGIGNITAEKLKKLGINKLVDTLSIEFDKLKGMIGEAKAKYLISLARDEYNEPIRTRVRKSIGRIVTMKRNSRNLEEIKPYLFRAIEESYYKLDKRIPKAIHVVAVTEDLDIVSRGRTFPHGISKETAYSESVKLLQKILEEDERKIRRIGVRFSKFIEAIGLDKF

SEQ ID NO: 146 - protein, 349 aa, Artificial
  Synthetic
MIVLFVDFDYFYAQVEEVLNPSLKGKPVVVCVFSGRFEDSGAVATANYEARKFGVKAGIPIVEAKKILPNAVYLPARKEVYQQVSSRIMNLLREYSEKIEIASIDEAYLDISDKVRDYREAYNLGLEIKNKILEKEKITVTVGISKNKVFAKIACDMAKPNGIKVIDDEEVKRLIRELDIADVPGIGNITAEKLKKLGINKLVDTLSIEFDKLKGMIGEAKAKYLISLARDEYNEPIRTRVRKSIGRIVTMKRNSRNLEEIKPYLFRAIEESYYKLDKRIPKAIHVVAVTEDLDIVSRGRTFPHGISKETAYSESVKLLQKILEEDERKIRRIGVRFSKFIEAIGLDKF

SEQ ID NO: 147 - protein, 349 aa, Artificial
  Synthetic
MIVLFVDFDYFYAQVEEVLNPSLKGKPVVVCVFSGRFEDSGAVATANYEARKFGVKAGIPIVEAKKCLPNAVYLPMRKEVYQQVSSRIMNLLREYSEKIEIASIDEAYLDISDKVRDYREAYNLGLEIKNKILEKEKITVTVGISKNKVFAKIACDMAKPNGIKVIDDEEVKRLIRELDIADVPGIGNITAEKLKKLGINKLVDTLSIEFDKLKGMIGEAKAKYLISLARDEYNEPIRTRVRKSIGRIVTMKRNSRNLEEIKPYLFRAIEESYYKLDKRIPKAIHVVAVTEDLDIVSRGRTFPHGISKETAYSESVKLLQKILEEDERKIRRIGVRFSKFIEAIGLDKF

SEQ ID NO: 148 - protein, 349 aa, Artificial
  Synthetic
MIVLFVDFDYFYAQVEEVLNPSLKGKPVVVCVFSGRFEDSGAVATANYEARKFGVKAGIPIVEAKKILPNAVYLPMRKEVYQQVSGRIMNLLREYSEKIEIASIDEAYLDISDKVRDYREAYNLGLEIKNKILEKEKITVTVGISKNKVFAKIACDMAKPNGIKVIDDEEVKRLIRELDIADVPGIGNITAEKLKKLGINKLVDTLSIEFDKLKGMIGEAKAKYLISLARDEYNEPIRTRVRKSIGRIVTMKRNSRNLEEIKPYLFRAIEESYYKLDKRIPKAIHVVAVTEDLDIVSRGRTFPHGISKETAYSESVKLLQKILEEDERKIRRIGVRFSKFIEAIGLDKF

SEQ ID NO: 149 - protein, 349 aa, Artificial
  Synthetic
MIVLFVDFDYFYAQVEEVLNPSLKGKPVVVCVFSGRFEDSGAVATANYEARKFGVKAGIPIVEAKKILPNAVYLPMRKEVYQQVSSRIMNLLREYGEKIEIASIDEAYLDISDKVRDYREAYNLGLEIKNKILEKEKITVTVGISKNKVFAKIACDMAKPNGIKVIDDEEVKRLIRELDIADVPGIGNITAEKLKKLGINKLVDTLSIEFDKLKGMIGEAKAKYLISLARDEYNEPIRTRVRKSIGRIVTMKRNSRNLEEIKPYLFRAIEESYYKLDKRIPKAIHVVAVTEDLDIVSRGRTFPHGISKETAYSESVKLLQKILEEDERKIRRIGVRFSKFIEAIGLDKF

SEQ ID NO: 150 - protein, 349 aa, Artificial
  Synthetic
MIVLFVDFDYFYAQVEEVLNPSLKGKPVVVCVFSGRFEDSGAVATANYEARKFGVKAGIPIVEAKKILPNCVYLPMRKEVYQQVSSRIMNLLREYSEKIEIASIDEAYLDISDKVRDYREAYNLGLEIKNKILEKEKITVTVGISKNKVFAKIAADMAKPNGIKVIDDEEVKRLIRELDIADVPGIGNITAEKLKKLGINKLCDTLSIEFDKLKGMIGEAKAKYLISLARDEYNEPIRTRVRKSIGRIVTMKRNSRNLEEIKPYLFRAIEESYYKLDKRIPKAIHVVAVTEDLDIVSRGRTFPHGISKETAYSESVKLLQKILEEDERKIRRIGVRFSKFIEAIGLDKF

SEQ ID NO: 151 - protein, 349 aa, Artificial
  Synthetic
MIVLFVDFDYFYAQVEEVLNPSLKGKPVVVCVFSGRFEDSGAVATANYEARKFGVKAGIPIVEAKKILPNAVYLPMRKEVYQQVSCRIMNLLREYSEKIEIASIDEAYLDISDKVRDYREAYNLGLEIKNKILEKEKITVTVGISKNKVFAKIAADMAKPNGIKVIDDEEVKRLIRELDIADVPGIGNITAEKLKKLGINKLCDTLSIEFDKLKGMIGEAKAKYLISLARDEYNEPIRTRVRKSIGRIVTMKRNSRNLEEIKPYLFRAIEESYYKLDKRIPKAIHVVAVTEDLDIVSRGRTFPHGISKETAYSESVKLLQKILEEDERKIRRIGVRFSKFIEAIGLDKF

SEQ ID NO: 152 - protein, 349 aa, Artificial
  Synthetic
MIVLFVDFDYFYAQVEEVLNPSLKGKPVVVSVFSGRFEDSGAVATANYEARKFGVKAGIPIVEAKKILPNAVYLPMRKEVYQQVSSRIMNLLREYSEKIEIASIDEAYLDISDKVRDYREAYNLGLEIKNKILEKEKITVTVGISKNKVFAKIAADMAKPNGIKVIDDEEVKRLIRELDIADVPGIGNITAEKLKKLGINKLCDTLSIEFDKLKGMIGEAKAKYLISLARDEYNEPIRTRVRKSIGRIVTMKRNSRNLEEIKPYLFRAIEESYYKLDKRIPKAIHVVAVTEDLDIVSRGRTFPHGISKETAYSESVKLLQKILEEDERKIRRIGVRFSKFIEAIGLDKF

SEQ ID NO: 153 - protein, 349 aa, Artificial
  Synthetic
MIVLFVDFDYFYAQVEEVLNPSLKGKPVVVCVFSGRFEDSGAVATANYEARKFGVKAGIPIVEAKKILPNAVYLPGRKEVYQQVSSRIMNLLREYSEKIEIASIDEAYLDISDKVRDYREAYNLGLEIKNKILEKEKITVTVGISKNKVFAKIAADMAKPNGIKVIDDEEVKRLIRELDIADVPGIGNITAEKLKKLGINKLCDTLSIEFDKLKGMIGEAKAKYLISLARDEYNEPIRTRVRKSIGRIVTMKRNSRNLEEIKPYLFRAIEESYYKLDKRIPKAIHVVAVTEDLDIVSRGRTFPHGISKETAYSESVKLLQKILEEDERKIRRIGVRFSKFIEAIGLDKF

SEQ ID NO: 154 - protein, 349 aa, Artificial
  Synthetic
MIVLFVDFDYFYAQVEEVLNPSLKGKPVVVCVFSGRFEDSGAVATANYEARKFGVKAGIPIVEAKKILPNAVYLPARKEVYQQVSSRIMNLLREYSEKIEIASIDEAYLDISDKVRDYREAYNLGLEIKNKILEKEKITVTVGISKNKVFAKIAADMAKPNGIKVIDDEEVKRLIRELDIADVPGIGNITAEKLKKLGINKLCDTLSIEFDKLKGMIGEAKAKYLISLARDEYNEPIRTRVRKSIGRIVTMKRNSRNLEEIKPYLFRAIEESYYKLDKRIPKAIHVVAVTEDLDIVSRGRTFPHGISKETAYSESVKLLQKILEEDERKIRRIGVRFSKFIEAIGLDKF

SEQ ID NO: 155 - protein, 349 aa, Artificial
  Synthetic
MIVLFVDFDYFYAQVEEVLNPSLKGKPVVVCVFSGRFEDSGAVATANYEARKFGVKAGIPIVEAKKCLPNAVYLPMRKEVYQQVSSRIMNLLREYSEKIEIASIDEAYLDISDKVRDYREAYNLGLEIKNKILEKEKITVTVGISKNKVFAKIAADMAKPNGIKVIDDEEVKRLIRELDIADVPGIGNITAEKLKKLGINKLCDTLSIEFDKLKGMIGEAKAKYLISLARDEYNEPIRTRVRKSIGRIVTMKRNSRNLEEIKPYLFRAIEESYYKLDKRIPKAIHVVAVTEDLDIVSRGRTFPHGISKETAYSESVKLLQKILEEDERKIRRIGVRFSKFIEAIGLDKF

SEQ ID NO: 156 - protein, 349 aa, Artificial
  Synthetic
MIVLFVDFDYFYAQVEEVLNPSLKGKPVVVCVFSGRFEDSGAVATANYEARKFGVKAGIPIVEAKKILPNAVYLPMRKEVYQQVSGRIMNLLREYSEKIEIASIDEAYLDISDKVRDYREAYNLGLEIKNKILEKEKITVTVGISKNKVFAKIAADMAKPNGIKVIDDEEVKRLIRELDIADVPGIGNITAEKLKKLGINKLCDTLSIEFDKLKGMIGEAKAKYLISLARDEYNEPIRTRVRKSIGRIVTMKRNSRNLEEIKPYLFRAIEESYYKLDKRIPKAIHVVAVTEDLDIVSRGRTFPHGISKETAYSESVKLLQKILEEDERKIRRIGVRFSKFIEAIGLDKF

SEQ ID NO: 157 - protein, 349 aa, Artificial
  Synthetic
MIVLFVDFDYFYAQVEEVLNPSLKGKPVVVCVFSGRFEDSGAVATANYEARKFGVKAGIPIVEAKKILPNAVYLPMRKEVYQQVSSRIMNLLREYGEKIEIASIDEAYLDISDKVRDYREAYNLGLEIKNKILEKEKITVTVGISKNKVFAKIAADMAKPNGIKVIDDEEVKRLIRELDIADVPGIGNITAEKLKKLGINKLCDTLSIEFDKLKGMIGEAKAKYLISLARDEYNEPIRTRVRKSIGRIVTMKRNSRNLEEIKPYLFRAIEESYYKLDKRIPKAIHVVAVTEDLDIVSRGRTFPHGISKETAYSESVKLLQKILEEDERKIRRIGVRFSKFIEAIGLDKF

SEQ ID NO: 158 - protein, 349 aa, Artificial; identical to SEQ ID NO: 144
  Synthetic

SEQ ID NO: 159 - protein, 349 aa, Artificial; identical to SEQ ID NO: 152
  Synthetic

SEQ ID NO: 160 - protein, 349 aa, Artificial; identical to SEQ ID NO: 137
  Synthetic

SEQ ID NO: 161 - protein, 346 aa, Artificial
  Synthetic
MIVLFVDFDYFYAQVEEVLNPSLKGKPVVVCVFSGRFEDSGAVATANYEARKFGVKAGIPIVEAKKILPNAVYLPMRKEVYQQVSSRIMNLLREYSEKIEIASIDEAYLDISDKVRDYREAYNLGLEIKNKILEKEKITVTVGISKNKVFAKIAADMAKPNGIKVIDDEEVKRLIRELDIADVPGIGNITAEKLKKLGINKLVDTLSIEFDKLKGMIGEAKAKYLISLARDEYNEPIRTRVRKSIGRIVTMKRNSRNLEEIKPYLFRAIEESYYKLDKRIPKAIHVVAVTEDLDIVSRGRTFPHGISKETAYSESVKLLQKILEEDERKIRRIGVRFSKFIEAIGL

SEQ ID NO: 162 - protein, 346 aa, Artificial
  Synthetic
MIVLFVDFDYFYAQVEEVLNPSLKGKPVVVCVFSGRFEDSGAVATANYEARKFGVKAGIPIVEAKKILPNAVYLPMRKEVYQQVSSRIMNLLREYSEKIEIASIDEAYLDISDKVRDYREAYNLGLEIKNKILEKEKITVTVGISKNKVFAKIACDMAKPNGIKVIDDEEVKRLIRELDIADVPGIGNITAEKLKKLGINKLVDTLSIEFDKLKGMIGEAKAKYLISLARDEYNEPIRTRVRKSIGRIVTMKRNSRNLEEIKPYLFRAIEESYYKLDKRIPKAIHVVAVTEDLDIVSRGRTFPHGISKETAYSESVKLLQKILEEDERKIRRIGVRFSKFIEAIGL

SEQ ID NO: 163 - protein, 346 aa, Artificial
  Synthetic
MIVLFVDFDYFYAQVEEVLNPSLKGKPVVVCVFSGRFEDSGAVATANYEARKFGVKAGIPIVEAKKILPNAVYLPMRKEVYQQVSSRIMNLLREYSEKIEIASIDEAYLDISDKVRDYREAYNLGLEIKNKILEKEKITVTVGISKNKVFAKIAADMAKPNGIKVIDDEEVKRLIRELDIADVPGIGNITAEKLKKLGINKLCDTLSIEFDKLKGMIGEAKAKYLISLARDEYNEPIRTRVRKSIGRIVTMKRNSRNLEEIKPYLFRAIEESYYKLDKRIPKAIHVVAVTEDLDIVSRGRTFPHGISKETAYSESVKLLQKILEEDERKIRRIGVRFSKFIEAIGL

SEQ ID NO: 164 - protein, 346 aa, Artificial
  Synthetic
MIVLFVDFDYFYAQVEEVLNPSLKGKPVVVCVFSGRFEDSGAVATANYEARKFGVKAGIPIVEAKKILPNAVYLPMRKEVYQQVSSRIMNLLREYSEKIEIASIDEAYLDISDKVRDYREAYNLGLEIKNKILEKEKITVTVGISKNKVFAKIACDMAKPNGIKVIDDEEVKRLIRELDIADVPGIGNITAEKLKKLGINKLCDTLSIEFDKLKGMIGEAKAKYLISLARDEYNEPIRTRVRKSIGRIVTMKRNSRNLEEIKPYLFRAIEESYYKLDKRIPKAIHVVAVTEDLDIVSRGRTFPHGISKETAYSESVKLLQKILEEDERKIRRIGVRFSKFIEAIGL

SEQ ID NO: 165 - protein, 346 aa, Artificial
  Synthetic
MIVLFVDFDYFYAQVEEVLNPSLKGKPVVVSVFSGRFEDSGAVATANYEARKFGVKAGIPIVEAKKILPNAVYLPMRKEVYQQVSSRIMNLLREYSEKIEIASIDEAYLDISDKVRDYREAYNLGLEIKNKILEKEKITVTVGISKNKVFAKIAADMAKPNGIKVIDDEEVKRLIRELDIADVPGIGNITAEKLKKLGINKLVDTLSIEFDKLKGMIGEAKAKYLISLARDEYNEPIRTRVRKSIGRIVTMKRNSRNLEEIKPYLFRAIEESYYKLDKRIPKAIHVVAVTEDLDIVSRGRTFPHGISKETAYSESVKLLQKILEEDERKIRRIGVRFSKFIEAIGL

SEQ ID NO: 166 - protein, 346 aa, Artificial
  Synthetic
MIVLFVDFDYFYAQVEEVLNPSLKGKPVVVCVFSGRFEDSGAVATANYEARKFGVKAGIPIVEAKKILPNAVYLPMRKEVYQQVCSRIMNLLREYSEKIEIASIDEAYLDISDKVRDYREAYNLGLEIKNKILEKEKITVTVGISKNKVFAKIAADMAKPNGIKVIDDEEVKRLIRELDIADVPGIGNITAEKLKKLGINKLVDTLSIEFDKLKGMIGEAKAKYLISLARDEYNEPIRTRVRKSIGRIVTMKRNSRNLEEIKPYLFRAIEESYYKLDKRIPKAIHVVAVTEDLDIVSRGRTFPHGISKETAYSESVKLLQKILEEDERKIRRIGVRFSKFIEAIGL

SEQ ID NO: 167 - protein, 346 aa, Artificial
  Synthetic
MIVLFVDFDYFYAQVEEVLNPSLKGKPVVVCVFSGRFEDSGAVATANYEARKFGVKAGIPIVEAKKILPNAVYLPMRKEVYQQVSCRIMNLLREYSEKIEIASIDEAYLDISDKVRDYREAYNLGLEIKNKILEKEKITVTVGISKNKVFAKIAADMAKPNGIKVIDDEEVKRLIRELDIADVPGIGNITAEKLKKLGINKLVDTLSIEFDKLKGMIGEAKAKYLISLARDEYNEPIRTRVRKSIGRIVTMKRNSRNLEEIKPYLFRAIEESYYKLDKRIPKAIHVVAVTEDLDIVSRGRTFPHGISKETAYSESVKLLQKILEEDERKIRRIGVRFSKFIEAIGL

SEQ ID NO: 168 - protein, 346 aa, Artificial
  Synthetic
MIVLFVDFDYFYAQVEEVLNPSLKGKPVVVCVFSGRFEDSGAVATANYEARKFGVKAGIPIVEAKKILPNAVYLPMRKEVYQQVSSRIMNLLREYCEKIEIASIDEAYLDISDKVRDYREAYNLGLEIKNKILEKEKITVTVGISKNKVFAKIAADMAKPNGIKVIDDEEVKRLIRELDIADVPGIGNITAEKLKKLGINKLVDTLSIEFDKLKGMIGEAKAKYLISLARDEYNEPIRTRVRKSIGRIVTMKRNSRNLEEIKPYLFRAIEESYYKLDKRIPKAIHVVAVTEDLDIVSRGRTFPHGISKETAYSESVKLLQKILEEDERKIRRIGVRFSKFIEAIGL

SEQ ID NO: 169 - protein, 346 aa, Artificial
  Synthetic
MIVLFVDFDYFYAQVEEVLNPSLKGKPVVVCVFSGRFEDSGAVATANYEARKFGVKAGIPIVEAKKILPNCVYLPMRKEVYQQVSSRIMNLLREYSEKIEIASIDEAYLDISDKVRDYREAYNLGLEIKNKILEKEKITVTVGISKNKVFAKIAADMAKPNGIKVIDDEEVKRLIRELDIADVPGIGNITAEKLKKLGINKLVDTLSIEFDKLKGMIGEAKAKYLISLARDEYNEPIRTRVRKSIGRIVTMKRNSRNLEEIKPYLFRAIEESYYKLDKRIPKAIHVVAVTEDLDIVSRGRTFPHGISKETAYSESVKLLQKILEEDERKIRRIGVRFSKFIEAIGL

SEQ ID NO: 170 - protein, 346 aa, Artificial
  Synthetic
MIVLFVDFDYFYAQVEEVLNPSLKGKPVVVCVFSGRFEDSGAVATANYEARKFGVKAGIPIVEAKKILPNAVYLPGRKEVYQQVSSRIMNLLREYSEKIEIASIDEAYLDISDKVRDYREAYNLGLEIKNKILEKEKITVTVGISKNKVFAKIAADMAKPNGIKVIDDEEVKRLIRELDIADVPGIGNITAEKLKKLGINKLVDTLSIEFDKLKGMIGEAKAKYLISLARDEYNEPIRTRVRKSIGRIVTMKRNSRNLEEIKPYLFRAIEESYYKLDKRIPKAIHVVAVTEDLDIVSRGRTFPHGISKETAYSESVKLLQKILEEDERKIRRIGVRFSKFIEAIGL

SEQ ID NO: 171 - protein, 346 aa, Artificial
  Synthetic
MIVLFVDFDYFYAQVEEVLNPSLKGKPVVVCVFSGRFEDSGAVATANYEARKFGVKAGIPIVEAKKILPNAVYLPARKEVYQQVSSRIMNLLREYSEKIEIASIDEAYLDISDKVRDYREAYNLGLEIKNKILEKEKITVTVGISKNKVFAKIAADMAKPNGIKVIDDEEVKRLIRELDIADVPGIGNITAEKLKKLGINKLVDTLSIEFDKLKGMIGEAKAKYLISLARDEYNEPIRTRVRKSIGRIVTMKRNSRNLEEIKPYLFRAIEESYYKLDKRIPKAIHVVAVTEDLDIVSRGRTFPHGISKETAYSESVKLLQKILEEDERKIRRIGVRFSKFIEAIGL

SEQ ID NO: 172 - protein, 346 aa, Artificial
  Synthetic
MIVLFVDFDYFYAQVEEVLNPSLKGKPVVVCVFSGRFEDSGAVATANYEARKFGVKAGIPIVEAKKCLPNAVYLPMRKEVYQQVSSRIMNLLREYSEKIEIASIDEAYLDISDKVRDYREAYNLGLEIKNKILEKEKITVTVGISKNKVFAKIAADMAKPNGIKVIDDEEVKRLIRELDIADVPGIGNITAEKLKKLGINKLVDTLSIEFDKLKGMIGEAKAKYLISLARDEYNEPIRTRVRKSIGRIVTMKRNSRNLEEIKPYLFRAIEESYYKLDKRIPKAIHVVAVTEDLDIVSRGRTFPHGISKETAYSESVKLLQKILEEDERKIRRIGVRFSKFIEAIGL

SEQ ID NO: 173 - protein, 346 aa, Artificial
  Synthetic
MIVLFVDFDYFYAQVEEVLNPSLKGKPVVVCVFSGRFEDSGAVATANYEARKFGVKAGIPIVEAKKILPNAVYLPMRKEVYQQVSGRIMNLLREYSEKIEIASIDEAYLDISDKVRDYREAYNLGLEIKNKILEKEKITVTVGISKNKVFAKIAADMAKPNGIKVIDDEEVKRLIRELDIADVPGIGNITAEKLKKLGINKLVDTLSIEFDKLKGMIGEAKAKYLISLARDEYNEPIRTRVRKSIGRIVTMKRNSRNLEEIKPYLFRAIEESYYKLDKRIPKAIHVVAVTEDLDIVSRGRTFPHGISKETAYSESVKLLQKILEEDERKIRRIGVRFSKFIEAIGL

SEQ ID NO: 174 - protein, 346 aa, Artificial
  Synthetic
MIVLFVDFDYFYAQVEEVLNPSLKGKPVVVCVFSGRFEDSGAVATANYEARKFGVKAGIPIVEAKKILPNCVYLPMRKEVYQQVSSRIMNLLREYSEKIEIASIDEAYLDISDKVRDYREAYNLGLEIKNKILEKEKITVTVGISKNKVFAKIACDMAKPNGIKVIDDEEVKRLIRELDIADVPGIGNITAEKLKKLGINKLCDTLSIEFDKLKGMIGEAKAKYLISLARDEYNEPIRTRVRKSIGRIVTMKRNSRNLEEIKPYLFRAIEESYYKLDKRIPKAIHVVAVTEDLDIVSRGRTFPHGISKETAYSESVKLLQKILEEDERKIRRIGVRFSKFIEAIGL

SEQ ID NO: 175 - protein, 346 aa, Artificial
  Synthetic
MIVLFVDFDYFYAQVEEVLNPSLKGKPVVVCVFSGRFEDSGAVATANYEARKFGVKAGIPIVEAKKILPNAVYLPMRKEVYQQVSCRIMNLLREYSEKIEIASIDEAYLDISDKVRDYREAYNLGLEIKNKILEKEKITVTVGISKNKVFAKIACDMAKPNGIKVIDDEEVKRLIRELDIADVPGIGNITAEKLKKLGINKLCDTLSIEFDKLKGMIGEAKAKYLISLARDEYNEPIRTRVRKSIGRIVTMKRNSRNLEEIKPYLFRAIEESYYKLDKRIPKAIHVVAVTEDLDIVSRGRTFPHGISKETAYSESVKLLQKILEEDERKIRRIGVRFSKFIEAIGL

SEQ ID NO: 176 - protein, 346 aa, Artificial
  Synthetic
MIVLFVDFDYFYAQVEEVLNPSLKGKPVVVSVFSGRFEDSGAVATANYEARKFGVKAGIPIVEAKKILPNAVYLPMRKEVYQQVSSRIMNLLREYSEKIEIASIDEAYLDISDKVRDYREAYNLGLEIKNKILEKEKITVTVGISKNKVFAKIACDMAKPNGIKVIDDEEVKRLIRELDIADVPGIGNITAEKLKKLGINKLCDTLSIEFDKLKGMIGEAKAKYLISLARDEYNEPIRTRVRKSIGRIVTMKRNSRNLEEIKPYLFRAIEESYYKLDKRIPKAIHVVAVTEDLDIVSRGRTFPHGISKETAYSESVKLLQKILEEDERKIRRIGVRFSKFIEAIGL

SEQ ID NO: 177 - protein, 346 aa, Artificial
  Synthetic
MIVLFVDFDYFYAQVEEVLNPSLKGKPVVVCVFSGRFEDSGAVATANYEARKFGVKAGIPIVEAKKILPNAVYLPGRKEVYQQVSSRIMNLLREYSEKIEIASIDEAYLDISDKVRDYREAYNLGLEIKNKILEKEKITVTVGISKNKVFAKIACDMAKPNGIKVIDDEEVKRLIRELDIADVPGIGNITAEKLKKLGINKLCDTLSIEFDKLKGMIGEAKAKYLISLARDEYNEPIRTRVRKSIGRIVTMKRNSRNLEEIKPYLFRAIEESYYKLDKRIPKAIHVVAVTEDLDIVSRGRTFPHGISKETAYSESVKLLQKILEEDERKIRRIGVRFSKFIEAIGL

SEQ ID NO: 178 - protein, 346 aa, Artificial
  Synthetic
MIVLFVDFDYFYAQVEEVLNPSLKGKPVVVCVFSGRFEDSGAVATANYEARKFGVKAGIPIVEAKKILPNAVYLPARKEVYQQVSSRIMNLLREYSEKIEIASIDEAYLDISDKVRDYREAYNLGLEIKNKILEKEKITVTVGISKNKVFAKIACDMAKPNGIKVIDDEEVKRLIRELDIADVPGIGNITAEKLKKLGINKLCDTLSIEFDKLKGMIGEAKAKYLISLARDEYNEPIRTRVRKSIGRIVTMKRNSRNLEEIKPYLFRAIEESYYKLDKRIPKAIHVVAVTEDLDIVSRGRTFPHGISKETAYSESVKLLQKILEEDERKIRRIGVRFSKFIEAIGL

SEQ ID NO: 179 - protein, 346 aa, Artificial
  Synthetic
MIVLFVDFDYFYAQVEEVLNPSLKGKPVVVCVFSGRFEDSGAVATANYEARKFGVKAGIPIVEAKKCLPNAVYLPMRKEVYQQVSSRIMNLLREYSEKIEIASIDEAYLDISDKVRDYREAYNLGLEIKNKILEKEKITVTVGISKNKVFAKIACDMAKPNGIKVIDDEEVKRLIRELDIADVPGIGNITAEKLKKLGINKLCDTLSIEFDKLKGMIGEAKAKYLISLARDEYNEPIRTRVRKSIGRIVTMKRNSRNLEEIKPYLFRAIEESYYKLDKRIPKAIHVVAVTEDLDIVSRGRTFPHGISKETAYSESVKLLQKILEEDERKIRRIGVRFSKFIEAIGL

SEQ ID NO: 180 - protein, 346 aa, Artificial
  Synthetic
MIVLFVDFDYFYAQVEEVLNPSLKGKPVVVCVFSGRFEDSGAVATANYEARKFGVKAGIPIVEAKKILPNAVYLPMRKEVYQQVSGRIMNLLREYSEKIEIASIDEAYLDISDKVRDYREAYNLGLEIKNKILEKEKITVTVGISKNKVFAKIACDMAKPNGIKVIDDEEVKRLIRELDIADVPGIGNITAEKLKKLGINKLCDTLSIEFDKLKGMIGEAKAKYLISLARDEYNEPIRTRVRKSIGRIVTMKRNSRNLEEIKPYLFRAIEESYYKLDKRIPKAIHVVAVTEDLDIVSRGRTFPHGISKETAYSESVKLLQKILEEDERKIRRIGVRFSKFIEAIGL

SEQ ID NO: 181 - protein, 346 aa, Artificial
  Synthetic
MIVLFVDFDYFYAQVEEVLNPSLKGKPVVVCVFSGRFEDSGAVATANYEARKFGVKAGIPIVEAKKILPNAVYLPMRKEVYQQVSSRIMNLLREYGEKIEIASIDEAYLDISDKVRDYREAYNLGLEIKNKILEKEKITVTVGISKNKVFAKIACDMAKPNGIKVIDDEEVKRLIRELDIADVPGIGNITAEKLKKLGINKLCDTLSIEFDKLKGMIGEAKAKYLISLARDEYNEPIRTRVRKSIGRIVTMKRNSRNLEEIKPYLFRAIEESYYKLDKRIPKAIHVVAVTEDLDIVSRGRTFPHGISKETAYSESVKLLQKILEEDERKIRRIGVRFSKFIEAIGL

SEQ ID NO: 182 - protein, 346 aa, Artificial
  Synthetic
MIVLFVDFDYFYAQVEEVLNPSLKGKPVVVCVFSGRFEDSGAVATANYEARKFGVKAGIPIVEAKKILPNCVYLPMRKEVYQQVSSRIMNLLREYSEKIEIASIDEAYLDISDKVRDYREAYNLGLEIKNKILEKEKITVTVGISKNKVFAKIACDMAKPNGIKVIDDEEVKRLIRELDIADVPGIGNITAEKLKKLGINKLVDTLSIEFDKLKGMIGEAKAKYLISLARDEYNEPIRTRVRKSIGRIVTMKRNSRNLEEIKPYLFRAIEESYYKLDKRIPKAIHVVAVTEDLDIVSRGRTFPHGISKETAYSESVKLLQKILEEDERKIRRIGVRFSKFIEAIGL

SEQ ID NO: 183 - protein, 346 aa, Artificial
  Synthetic
MIVLFVDFDYFYAQVEEVLNPSLKGKPVVVCVFSGRFEDSGAVATANYEARKFGVKAGIPIVEAKKILPNAVYLPMRKEVYQQVSCRIMNLLREYSEKIEIASIDEAYLDISDKVRDYREAYNLGLEIKNKILEKEKITVTVGISKNKVFAKIACDMAKPNGIKVIDDEEVKRLIRELDIADVPGIGNITAEKLKKLGINKLVDTLSIEFDKLKGMIGEAKAKYLISLARDEYNEPIRTRVRKSIGRIVTMKRNSRNLEEIKPYLFRAIEESYYKLDKRIPKAIHVVAVTEDLDIVSRGRTFPHGISKETAYSESVKLLQKILEEDERKIRRIGVRFSKFIEAIGL

SEQ ID NO: 184 - protein, 346 aa, Artificial
  Synthetic
MIVLFVDFDYFYAQVEEVLNPSLKGKPVVVSVFSGRFEDSGAVATANYEARKFGVKAGIPIVEAKKILPNAVYLPMRKEVYQQVSSRIMNLLREYSEKIEIASIDEAYLDISDKVRDYREAYNLGLEIKNKILEKEKITVTVGISKNKVFAKIACDMAKPNGIKVIDDEEVKRLIRELDIADVPGIGNITAEKLKKLGINKLVDTLSIEFDKLKGMIGEAKAKYLISLARDEYNEPIRTRVRKSIGRIVTMKRNSRNLEEIKPYLFRAIEESYYKLDKRIPKAIHVVAVTEDLDIVSRGRTFPHGISKETAYSESVKLLQKILEEDERKIRRIGVRFSKFIEAIGL

SEQ ID NO: 185 - protein, 346 aa, Artificial
  Synthetic
MIVLFVDFDYFYAQVEEVLNPSLKGKPVVVCVFSGRFEDSGAVATANYEARKFGVKAGIPIVEAKKILPNAVYLPGRKEVYQQVSSRIMNLLREYSEKIEIASIDEAYLDISDKVRDYREAYNLGLEIKNKILEKEKITVTVGISKNKVFAKIACDMAKPNGIKVIDDEEVKRLIRELDIADVPGIGNITAEKLKKLGINKLVDTLSIEFDKLKGMIGEAKAKYLISLARDEYNEPIRTRVRKSIGRIVTMKRNSRNLEEIKPYLFRAIEESYYKLDKRIPKAIHVVAVTEDLDIVSRGRTFPHGISKETAYSESVKLLQKILEEDERKIRRIGVRFSKFIEAIGL

SEQ ID NO: 186 - protein, 346 aa, Artificial
  Synthetic
MIVLFVDFDYFYAQVEEVLNPSLKGKPVVVCVFSGRFEDSGAVATANYEARKFGVKAGIPIVEAKKILPNAVYLPARKEVYQQVSSRIMNLLREYSEKIEIASIDEAYLDISDKVRDYREAYNLGLEIKNKILEKEKITVTVGISKNKVFAKIACDMAKPNGIKVIDDEEVKRLIRELDIADVPGIGNITAEKLKKLGINKLVDTLSIEFDKLKGMIGEAKAKYLISLARDEYNEPIRTRVRKSIGRIVTMKRNSRNLEEIKPYLFRAIEESYYKLDKRIPKAIHVVAVTEDLDIVSRGRTFPHGISKETAYSESVKLLQKILEEDERKIRRIGVRFSKFIEAIGL

SEQ ID NO: 187 - protein, 346 aa, Artificial
  Synthetic
MIVLFVDFDYFYAQVEEVLNPSLKGKPVVVCVFSGRFEDSGAVATANYEARKFGVKAGIPIVEAKKCLPNAVYLPMRKEVYQQVSSRIMNLLREYSEKIEIASIDEAYLDISDKVRDYREAYNLGLEIKNKILEKEKITVTVGISKNKVFAKIACDMAKPNGIKVIDDEEVKRLIRELDIADVPGIGNITAEKLKKLGINKLVDTLSIEFDKLKGMIGEAKAKYLISLARDEYNEPIRTRVRKSIGRIVTMKRNSRNLEEIKPYLFRAIEESYYKLDKRIPKAIHVVAVTEDLDIVSRGRTFPHGISKETAYSESVKLLQKILEEDERKIRRIGVRFSKFIEAIGL

SEQ ID NO: 188 - protein, 346 aa, Artificial
  Synthetic
MIVLFVDFDYFYAQVEEVLNPSLKGKPVVVCVFSGRFEDSGAVATANYEARKFGVKAGIPIVEAKKILPNAVYLPMRKEVYQQVSGRIMNLLREYSEKIEIASIDEAYLDISDKVRDYREAYNLGLEIKNKILEKEKITVTVGISKNKVFAKIACDMAKPNGIKVIDDEEVKRLIRELDIADVPGIGNITAEKLKKLGINKLVDTLSIEFDKLKGMIGEAKAKYLISLARDEYNEPIRTRVRKSIGRIVTMKRNSRNLEEIKPYLFRAIEESYYKLDKRIPKAIHVVAVTEDLDIVSRGRTFPHGISKETAYSESVKLLQKILEEDERKIRRIGVRFSKFIEAIGL

SEQ ID NO: 189 - protein, 346 aa, Artificial
  Synthetic
MIVLFVDFDYFYAQVEEVLNPSLKGKPVVVCVFSGRFEDSGAVATANYEARKFGVKAGIPIVEAKKILPNAVYLPMRKEVYQQVSSRIMNLLREYGEKIEIASIDEAYLDISDKVRDYREAYNLGLEIKNKILEKEKITVTVGISKNKVFAKIACDMAKPNGIKVIDDEEVKRLIRELDIADVPGIGNITAEKLKKLGINKLVDTLSIEFDKLKGMIGEAKAKYLISLARDEYNEPIRTRVRKSIGRIVTMKRNSRNLEEIKPYLFRAIEESYYKLDKRIPKAIHVVAVTEDLDIVSRGRTFPHGISKETAYSESVKLLQKILEEDERKIRRIGVRFSKFIEAIGL

SEQ ID NO: 190 - protein, 346 aa, Artificial
  Synthetic
MIVLFVDFDYFYAQVEEVLNPSLKGKPVVVCVFSGRFEDSGAVATANYEARKFGVKAGIPIVEAKKILPNCVYLPMRKEVYQQVSSRIMNLLREYSEKIEIASIDEAYLDISDKVRDYREAYNLGLEIKNKILEKEKITVTVGISKNKVFAKIAADMAKPNGIKVIDDEEVKRLIRELDIADVPGIGNITAEKLKKLGINKLCDTLSIEFDKLKGMIGEAKAKYLISLARDEYNEPIRTRVRKSIGRIVTMKRNSRNLEEIKPYLFRAIEESYYKLDKRIPKAIHVVAVTEDLDIVSRGRTFPHGISKETAYSESVKLLQKILEEDERKIRRIGVRFSKFIEAIGL

SEQ ID NO: 191 - protein, 346 aa, Artificial
  Synthetic
MIVLFVDFDYFYAQVEEVLNPSLKGKPVVVCVFSGRFEDSGAVATANYEARKFGVKAGIPIVEAKKILPNAVYLPMRKEVYQQVSCRIMNLLREYSEKIEIASIDEAYLDISDKVRDYREAYNLGLEIKNKILEKEKITVTVGISKNKVFAKIAADMAKPNGIKVIDDEEVKRLIRELDIADVPGIGNITAEKLKKLGINKLCDTLSIEFDKLKGMIGEAKAKYLISLARDEYNEPIRTRVRKSIGRIVTMKRNSRNLEEIKPYLFRAIEESYYKLDKRIPKAIHVVAVTEDLDIVSRGRTFPHGISKETAYSESVKLLQKILEEDERKIRRIGVRFSKFIEAIGL

SEQ ID NO: 192 - protein, 346 aa, Artificial
  Synthetic
MIVLFVDFDYFYAQVEEVLNPSLKGKPVVVSVFSGRFEDSGAVATANYEARKFGVKAGIPIVEAKKILPNAVYLPMRKEVYQQVSSRIMNLLREYSEKIEIASIDEAYLDISDKVRDYREAYNLGLEIKNKILEKEKITVTVGISKNKVFAKIAADMAKPNGIKVIDDEEVKRLIRELDIADVPGIGNITAEKLKKLGINKLCDTLSIEFDKLKGMIGEAKAKYLISLARDEYNEPIRTRVRKSIGRIVTMKRNSRNLEEIKPYLFRAIEESYYKLDKRIPKAIHVVAVTEDLDIVSRGRTFPHGISKETAYSESVKLLQKILEEDERKIRRIGVRFSKFIEAIGL

SEQ ID NO: 193 - protein, 346 aa, Artificial
  Synthetic
MIVLFVDFDYFYAQVEEVLNPSLKGKPVVVCVFSGRFEDSGAVATANYEARKFGVKAGIPIVEAKKILPNAVYLPGRKEVYQQVSSRIMNLLREYSEKIEIASIDEAYLDISDKVRDYREAYNLGLEIKNKILEKEKITVTVGISKNKVFAKIAADMAKPNGIKVIDDEEVKRLIRELDIADVPGIGNITAEKLKKLGINKLCDTLSIEFDKLKGMIGEAKAKYLISLARDEYNEPIRTRVRKSIGRIVTMKRNSRNLEEIKPYLFRAIEESYYKLDKRIPKAIHVVAVTEDLDIVSRGRTFPHGISKETAYSESVKLLQKILEEDERKIRRIGVRFSKFIEAIGL

SEQ ID NO: 194 - protein, 346 aa, Artificial
  Synthetic
MIVLFVDFDYFYAQVEEVLNPSLKGKPVVVCVFSGRFEDSGAVATANYEARKFGVKAGIPIVEAKKILPNAVYLPARKEVYQQVSSRIMNLLREYSEKIEIASIDEAYLDISDKVRDYREAYNLGLEIKNKILEKEKITVTVGISKNKVFAKIAADMAKPNGIKVIDDEEVKRLIRELDIADVPGIGNITAEKLKKLGINKLCDTLSIEFDKLKGMIGEAKAKYLISLARDEYNEPIRTRVRKSIGRIVTMKRNSRNLEEIKPYLFRAIEESYYKLDKRIPKAIHVVAVTEDLDIVSRGRTFPHGISKETAYSESVKLLQKILEEDERKIRRIGVRFSKFIEAIGL

SEQ ID NO: 195 - protein, 346 aa, Artificial
  Synthetic
MIVLFVDFDYFYAQVEEVLNPSLKGKPVVVCVFSGRFEDSGAVATANYEARKFGVKAGIPIVEAKKCLPNAVYLPMRKEVYQQVSSRIMNLLREYSEKIEIASIDEAYLDISDKVRDYREAYNLGLEIKNKILEKEKITVTVGISKNKVFAKIAADMAKPNGIKVIDDEEVKRLIRELDIADVPGIGNITAEKLKKLGINKLCDTLSIEFDKLKGMIGEAKAKYLISLARDEYNEPIRTRVRKSIGRIVTMKRNSRNLEEIKPYLFRAIEESYYKLDKRIPKAIHVVAVTEDLDIVSRGRTFPHGISKETAYSESVKLLQKILEEDERKIRRIGVRFSKFIEAIGL

SEQ ID NO: 196 - protein, 346 aa, Artificial
  Synthetic
MIVLFVDFDYFYAQVEEVLNPSLKGKPVVVCVFSGRFEDSGAVATANYEARKFGVKAGIPIVEAKKILPNAVYLPMRKEVYQQVSGRIMNLLREYSEKIEIASIDEAYLDISDKVRDYREAYNLGLEIKNKILEKEKITVTVGISKNKVFAKIAADMAKPNGIKVIDDEEVKRLIRELDIADVPGIGNITAEKLKKLGINKLCDTLSIEFDKLKGMIGEAKAKYLISLARDEYNEPIRTRVRKSIGRIVTMKRNSRNLEEIKPYLFRAIEESYYKLDKRIPKAIHVVAVTEDLDIVSRGRTFPHGISKETAYSESVKLLQKILEEDERKIRRIGVRFSKFIEAIGL

SEQ ID NO: 197 - protein, 346 aa, Artificial
  Synthetic
MIVLFVDFDYFYAQVEEVLNPSLKGKPVVVCVFSGRFEDSGAVATANYEARKFGVKAGIPIVEAKKILPNAVYLPMRKEVYQQVSSRIMNLLREYGEKIEIASIDEAYLDISDKVRDYREAYNLGLEIKNKILEKEKITVTVGISKNKVFAKIAADMAKPNGIKVIDDEEVKRLIRELDIADVPGIGNITAEKLKKLGINKLCDTLSIEFDKLKGMIGEAKAKYLISLARDEYNEPIRTRVRKSIGRIVTMKRNSRNLEEIKPYLFRAIEESYYKLDKRIPKAIHVVAVTEDLDIVSRGRTFPHGISKETAYSESVKLLQKILEEDERKIRRIGVRFSKFIEAIGL

SEQ ID NO: 198 - protein, 346 aa, Artificial; identical to SEQ ID NO: 184
  Synthetic

SEQ ID NO: 199 - protein, 346 aa, Artificial; identical to SEQ ID NO: 192
  Synthetic

SEQ ID NO: 200 - protein, 346 aa, Artificial; identical to SEQ ID NO: 176
  Synthetic

SEQ ID NO: 201 - protein, 343 aa, Artificial
  Synthetic
MIVLFVDFDYFYAQVEEVLNPSLKGKPVVVCVFSGRFEDSGAVATANYEARKFGVKAGIPIVEAKKILPNAVYLPMRKEVYQQVSSRIMNLLREYSEKIEIASIDEAYLDISDKVRDYREAYNLGLEIKNKILEKEKITVTVGISKNKVFAKIAADMAKPNGIKVIDDEEVKRLIRELDIADVPGIGNITAEKLKKLGINKLVDTLSIEFDKLKGMIGEAKAKYLISLARDEYNEPIRTRVRKSIGRIVTMKRNSRNLEEIKPYLFRAIEESYYKLDKRIPKAIHVVAVTEDLDIVSRGRTFPHGISKETAYSESVKLLQKILEEDERKIRRIGVRFSKFIEA

SEQ ID NO: 202 - protein, 343 aa, Artificial
  Synthetic
MIVLFVDFDYFYAQVEEVLNPSLKGKPVVVCVFSGRFEDSGAVATANYEARKFGVKAGIPIVEAKKILPNAVYLPMRKEVYQQVSSRIMNLLREYSEKIEIASIDEAYLDISDKVRDYREAYNLGLEIKNKILEKEKITVTVGISKNKVFAKIACDMAKPNGIKVIDDEEVKRLIRELDIADVPGIGNITAEKLKKLGINKLVDTLSIEFDKLKGMIGEAKAKYLISLARDEYNEPIRTRVRKSIGRIVTMKRNSRNLEEIKPYLFRAIEESYYKLDKRIPKAIHVVAVTEDLDIVSRGRTFPHGISKETAYSESVKLLQKILEEDERKIRRIGVRFSKFIEA

SEQ ID NO: 203 - protein, 343 aa, Artificial
  Synthetic
MIVLFVDFDYFYAQVEEVLNPSLKGKPVVVCVFSGRFEDSGAVATANYEARKFGVKAGIPIVEAKKILPNAVYLPMRKEVYQQVSSRIMNLLREYSEKIEIASIDEAYLDISDKVRDYREAYNLGLEIKNKILEKEKITVTVGISKNKVFAKIAADMAKPNGIKVIDDEEVKRLIRELDIADVPGIGNITAEKLKKLGINKLCDTLSIEFDKLKGMIGEAKAKYLISLARDEYNEPIRTRVRKSIGRIVTMKRNSRNLEEIKPYLFRAIEESYYKLDKRIPKAIHVVAVTEDLDIVSRGRTFPHGISKETAYSESVKLLQKILEEDERKIRRIGVRFSKFIEA

SEQ ID NO: 204 - protein, 343 aa, Artificial
  Synthetic
MIVLFVDFDYFYAQVEEVLNPSLKGKPVVVCVFSGRFEDSGAVATANYEARKFGVKAGIPIVEAKKILPNAVYLPMRKEVYQQVSSRIMNLLREYSEKIEIASIDEAYLDISDKVRDYREAYNLGLEIKNKILEKEKITVTVGISKNKVFAKIACDMAKPNGIKVIDDEEVKRLIRELDIADVPGIGNITAEKLKKLGINKLCDTLSIEFDKLKGMIGEAKAKYLISLARDEYNEPIRTRVRKSIGRIVTMKRNSRNLEEIKPYLFRAIEESYYKLDKRIPKAIHVVAVTEDLDIVSRGRTFPHGISKETAYSESVKLLQKILEEDERKIRRIGVRFSKFIEA

SEQ ID NO: 205 - protein, 343 aa, Artificial
  Synthetic
MIVLFVDFDYFYAQVEEVLNPSLKGKPVVVSVFSGRFEDSGAVATANYEARKFGVKAGIPIVEAKKILPNAVYLPMRKEVYQQVSSRIMNLLREYSEKIEIASIDEAYLDISDKVRDYREAYNLGLEIKNKILEKEKITVTVGISKNKVFAKIAADMAKPNGIKVIDDEEVKRLIRELDIADVPGIGNITAEKLKKLGINKLVDTLSIEFDKLKGMIGEAKAKYLISLARDEYNEPIRTRVRKSIGRIVTMKRNSRNLEEIKPYLFRAIEESYYKLDKRIPKAIHVVAVTEDLDIVSRGRTFPHGISKETAYSESVKLLQKILEEDERKIRRIGVRFSKFIEA

SEQ ID NO: 206 - protein, 343 aa, Artificial
  Synthetic
MIVLFVDFDYFYAQVEEVLNPSLKGKPVVVCVFSGRFEDSGAVATANYEARKFGVKAGIPIVEAKKILPNAVYLPMRKEVYQQVCSRIMNLLREYSEKIEIASIDEAYLDISDKVRDYREAYNLGLEIKNKILEKEKITVTVGISKNKVFAKIAADMAKPNGIKVIDDEEVKRLIRELDIADVPGIGNITAEKLKKLGINKLVDTLSIEFDKLKGMIGEAKAKYLISLARDEYNEPIRTRVRKSIGRIVTMKRNSRNLEEIKPYLFRAIEESYYKLDKRIPKAIHVVAVTEDLDIVSRGRTFPHGISKETAYSESVKLLQKILEEDERKIRRIGVRFSKFIEA

SEQ ID NO: 207 - protein, 343 aa, Artificial
  Synthetic
MIVLFVDFDYFYAQVEEVLNPSLKGKPVVVCVFSGRFEDSGAVATANYEARKFGVKAGIPIVEAKKILPNAVYLPMRKEVYQQVSCRIMNLLREYSEKIEIASIDEAYLDISDKVRDYREAYNLGLEIKNKILEKEKITVTVGISKNKVFAKIAADMAKPNGIKVIDDEEVKRLIRELDIADVPGIGNITAEKLKKLGINKLVDTLSIEFDKLKGMIGEAKAKYLISLARDEYNEPIRTRVRKSIGRIVTMKRNSRNLEEIKPYLFRAIEESYYKLDKRIPKAIHVVAVTEDLDIVSRGRTFPHGISKETAYSESVKLLQKILEEDERKIRRIGVRFSKFIEA

SEQ ID NO: 208 - protein, 343 aa, Artificial
  Synthetic
MIVLFVDFDYFYAQVEEVLNPSLKGKPVVVCVFSGRFEDSGAVATANYEARKFGVKAGIPIVEAKKILPNAVYLPMRKEVYQQVSSRIMNLLREYCEKIEIASIDEAYLDISDKVRDYREAYNLGLEIKNKILEKEKITVTVGISKNKVFAKIAADMAKPNGIKVIDDEEVKRLIRELDIADVPGIGNITAEKLKKLGINKLVDTLSIEFDKLKGMIGEAKAKYLISLARDEYNEPIRTRVRKSIGRIVTMKRNSRNLEEIKPYLFRAIEESYYKLDKRIPKAIHVVAVTEDLDIVSRGRTFPHGISKETAYSESVKLLQKILEEDERKIRRIGVRFSKFIEA

SEQ ID NO: 209 - protein, 343 aa, Artificial
  Synthetic
MIVLFVDFDYFYAQVEEVLNPSLKGKPVVVCVFSGRFEDSGAVATANYEARKFGVKAGIPIVEAKKILPNCVYLPMRKEVYQQVSSRIMNLLREYSEKIEIASIDEAYLDISDKVRDYREAYNLGLEIKNKILEKEKITVTVGISKNKVFAKIAADMAKPNGIKVIDDEEVKRLIRELDIADVPGIGNITAEKLKKLGINKLVDTLSIEFDKLKGMIGEAKAKYLISLARDEYNEPIRTRVRKSIGRIVTMKRNSRNLEEIKPYLFRAIEESYYKLDKRIPKAIHVVAVTEDLDIVSRGRTFPHGISKETAYSESVKLLQKILEEDERKIRRIGVRFSKFIEA

SEQ ID NO: 210 - protein, 343 aa, Artificial
  Synthetic
MIVLFVDFDYFYAQVEEVLNPSLKGKPVVVCVFSGRFEDSGAVATANYEARKFGVKAGIPIVEAKKILPNAVYLPGRKEVYQQVSSRIMNLLREYSEKIEIASIDEAYLDISDKVRDYREAYNLGLEIKNKILEKEKITVTVGISKNKVFAKIAADMAKPNGIKVIDDEEVKRLIRELDIADVPGIGNITAEKLKKLGINKLVDTLSIEFDKLKGMIGEAKAKYLISLARDEYNEPIRTRVRKSIGRIVTMKRNSRNLEEIKPYLFRAIEESYYKLDKRIPKAIHVVAVTEDLDIVSRGRTFPHGISKETAYSESVKLLQKILEEDERKIRRIGVRFSKFIEA

SEQ ID NO: 211 - protein, 343 aa, Artificial
  Synthetic
MIVLFVDFDYFYAQVEEVLNPSLKGKPVVVCVFSGRFEDSGAVATANYEARKFGVKAGIPIVEAKKILPNAVYLPARKEVYQQVSSRIMNLLREYSEKIEIASIDEAYLDISDKVRDYREAYNLGLEIKNKILEKEKITVTVGISKNKVFAKIAADMAKPNGIKVIDDEEVKRLIRELDIADVPGIGNITAEKLKKLGINKLVDTLSIEFDKLKGMIGEAKAKYLISLARDEYNEPIRTRVRKSIGRIVTMKRNSRNLEEIKPYLFRAIEESYYKLDKRIPKAIHVVAVTEDLDIVSRGRTFPHGISKETAYSESVKLLQKILEEDERKIRRIGVRFSKFIEA

SEQ ID NO: 212 - protein, 286 aa, Artificial
  Synthetic
GIPIVEAKKCLPNAVYLPMRKEVYQQVSSRIMNLLREYSEKIEIASIDEAYLDISDKVRDYREAYNLGLEIKNKILEKEKITVTVGISKNKVFAKIAADMAKPNGIKVIDDEEVKRLIRELDIADVPGIGNITAEKLKKLGINKLVDTLSIEFDKLKGMIGEAKAKYLISLARDEYNEPIRTRVRKSIGRIVTMKRNSRNLEEIKPYLFRAIEESYYKLDKRIPKAIHVVAVTEDLDIVSRGRTFPHGISKETAYSESVKLLQKILEEDERKIRRIGVRFSKFIEA

SEQ ID NO: 213 - protein, 343 aa, Artificial
  Synthetic
MIVLFVDFDYFYAQVEEVLNPSLKGKPVVVCVFSGRFEDSGAVATANYEARKFGVKAGIPIVEAKKILPNAVYLPMRKEVYQQVSGRIMNLLREYSEKIEIASIDEAYLDISDKVRDYREAYNLGLEIKNKILEKEKITVTVGISKNKVFAKIAADMAKPNGIKVIDDEEVKRLIRELDIADVPGIGNITAEKLKKLGINKLVDTLSIEFDKLKGMIGEAKAKYLISLARDEYNEPIRTRVRKSIGRIVTMKRNSRNLEEIKPYLFRAIEESYYKLDKRIPKAIHVVAVTEDLDIVSRGRTFPHGISKETAYSESVKLLQKILEEDERKIRRIGVRFSKFIEA

SEQ ID NO: 214 - protein, 343 aa, Artificial
  Synthetic
MIVLFVDFDYFYAQVEEVLNPSLKGKPVVVCVFSGRFEDSGAVATANYEARKFGVKAGIPIVEAKKILPNCVYLPMRKEVYQQVSSRIMNLLREYSEKIEIASIDEAYLDISDKVRDYREAYNLGLEIKNKILEKEKITVTVGISKNKVFAKIACDMAKPNGIKVIDDEEVKRLIRELDIADVPGIGNITAEKLKKLGINKLCDTLSIEFDKLKGMIGEAKAKYLISLARDEYNEPIRTRVRKSIGRIVTMKRNSRNLEEIKPYLFRAIEESYYKLDKRIPKAIHVVAVTEDLDIVSRGRTFPHGISKETAYSESVKLLQKILEEDERKIRRIGVRFSKFIEA

SEQ ID NO: 215 - protein, 343 aa, Artificial
  Synthetic
MIVLFVDFDYFYAQVEEVLNPSLKGKPVVVCVFSGRFEDSGAVATANYEARKFGVKAGIPIVEAKKILPNAVYLPMRKEVYQQVSCRIMNLLREYSEKIEIASIDEAYLDISDKVRDYREAYNLGLEIKNKILEKEKITVTVGISKNKVFAKIACDMAKPNGIKVIDDEEVKRLIRELDIADVPGIGNITAEKLKKLGINKLCDTLSIEFDKLKGMIGEAKAKYLISLARDEYNEPIRTRVRKSIGRIVTMKRNSRNLEEIKPYLFRAIEESYYKLDKRIPKAIHVVAVTEDLDIVSRGRTFPHGISKETAYSESVKLLQKILEEDERKIRRIGVRFSKFIEA

SEQ ID NO: 216 - protein, 343 aa, Artificial
  Synthetic
MIVLFVDFDYFYAQVEEVLNPSLKGKPVVVSVFSGRFEDSGAVATANYEARKFGVKAGIPIVEAKKILPNAVYLPMRKEVYQQVSSRIMNLLREYSEKIEIASIDEAYLDISDKVRDYREAYNLGLEIKNKILEKEKITVTVGISKNKVFAKIACDMAKPNGIKVIDDEEVKRLIRELDIADVPGIGNITAEKLKKLGINKLCDTLSIEFDKLKGMIGEAKAKYLISLARDEYNEPIRTRVRKSIGRIVTMKRNSRNLEEIKPYLFRAIEESYYKLDKRIPKAIHVVAVTEDLDIVSRGRTFPHGISKETAYSESVKLLQKILEEDERKIRRIGVRFSKFIEA

SEQ ID NO: 217 - protein, 343 aa, Artificial
  Synthetic
MIVLFVDFDYFYAQVEEVLNPSLKGKPVVVCVFSGRFEDSGAVATANYEARKFGVKAGIPIVEAKKILPNAVYLPGRKEVYQQVSSRIMNLLREYSEKIEIASIDEAYLDISDKVRDYREAYNLGLEIKNKILEKEKITVTVGISKNKVFAKIACDMAKPNGIKVIDDEEVKRLIRELDIADVPGIGNITAEKLKKLGINKLCDTLSIEFDKLKGMIGEAKAKYLISLARDEYNEPIRTRVRKSIGRIVTMKRNSRNLEEIKPYLFRAIEESYYKLDKRIPKAIHVVAVTEDLDIVSRGRTFPHGISKETAYSESVKLLQKILEEDERKIRRIGVRFSKFIEA

SEQ ID NO: 218 - protein, 343 aa, Artificial
  Synthetic
MIVLFVDFDYFYAQVEEVLNPSLKGKPVVVCVFSGRFEDSGAVATANYEARKFGVKAGIPIVEAKKILPNAVYLPARKEVYQQVSSRIMNLLREYSEKIEIASIDEAYLDISDKVRDYREAYNLGLEIKNKILEKEKITVTVGISKNKVFAKIACDMAKPNGIKVIDDEEVKRLIRELDIADVPGIGNITAEKLKKLGINKLCDTLSIEFDKLKGMIGEAKAKYLISLARDEYNEPIRTRVRKSIGRIVTMKRNSRNLEEIKPYLFRAIEESYYKLDKRIPKAIHVVAVTEDLDIVSRGRTFPHGISKETAYSESVKLLQKILEEDERKIRRIGVRFSKFIEA

SEQ ID NO: 219 - protein, 343 aa, Artificial
  Synthetic
MIVLFVDFDYFYAQVEEVLNPSLKGKPVVVCVFSGRFEDSGAVATANYEARKFGVKAGIPIVEAKKCLPNAVYLPMRKEVYQQVSSRIMNLLREYSEKIEIASIDEAYLDISDKVRDYREAYNLGLEIKNKILEKEKITVTVGISKNKVFAKIACDMAKPNGIKVIDDEEVKRLIRELDIADVPGIGNITAEKLKKLGINKLCDTLSIEFDKLKGMIGEAKAKYLISLARDEYNEPIRTRVRKSIGRIVTMKRNSRNLEEIKPYLFRAIEESYYKLDKRIPKAIHVVAVTEDLDIVSRGRTFPHGISKETAYSESVKLLQKILEEDERKIRRIGVRFSKFIEA

SEQ ID NO: 220 - protein, 343 aa, Artificial
  Synthetic
MIVLFVDFDYFYAQVEEVLNPSLKGKPVVVCVFSGRFEDSGAVATANYEARKFGVKAGIPIVEAKKILPNAVYLPMRKEVYQQVSGRIMNLLREYSEKIEIASIDEAYLDISDKVRDYREAYNLGLEIKNKILEKEKITVTVGISKNKVFAKIACDMAKPNGIKVIDDEEVKRLIRELDIADVPGIGNITAEKLKKLGINKLCDTLSIEFDKLKGMIGEAKAKYLISLARDEYNEPIRTRVRKSIGRIVTMKRNSRNLEEIKPYLFRAIEESYYKLDKRIPKAIHVVAVTEDLDIVSRGRTFPHGISKETAYSESVKLLQKILEEDERKIRRIGVRFSKFIEA

SEQ ID NO: 221 - protein, 343 aa, Artificial
  Synthetic
MIVLFVDFDYFYAQVEEVLNPSLKGKPVVVCVFSGRFEDSGAVATANYEARKFGVKAGIPIVEAKKILPNAVYLPMRKEVYQQVSSRIMNLLREYGEKIEIASIDEAYLDISDKVRDYREAYNLGLEIKNKILEKEKITVTVGISKNKVFAKIACDMAKPNGIKVIDDEEVKRLIRELDIADVPGIGNITAEKLKKLGINKLCDTLSIEFDKLKGMIGEAKAKYLISLARDEYNEPIRTRVRKSIGRIVTMKRNSRNLEEIKPYLFRAIEESYYKLDKRIPKAIHVVAVTEDLDIVSRGRTFPHGISKETAYSESVKLLQKILEEDERKIRRIGVRFSKFIEA

SEQ ID NO: 222 - protein, 343 aa, Artificial
  Synthetic
MIVLFVDFDYFYAQVEEVLNPSLKGKPVVVCVFSGRFEDSGAVATANYEARKFGVKAGIPIVEAKKILPNCVYLPMRKEVYQQVSSRIMNLLREYSEKIEIASIDEAYLDISDKVRDYREAYNLGLEIKNKILEKEKITVTVGISKNKVFAKIACDMAKPNGIKVIDDEEVKRLIRELDIADVPGIGNITAEKLKKLGINKLVDTLSIEFDKLKGMIGEAKAKYLISLARDEYNEPIRTRVRKSIGRIVTMKRNSRNLEEIKPYLFRAIEESYYKLDKRIPKAIHVVAVTEDLDIVSRGRTFPHGISKETAYSESVKLLQKILEEDERKIRRIGVRFSKFIEA

SEQ ID NO: 223 - protein, 343 aa, Artificial
  Synthetic
MIVLFVDFDYFYAQVEEVLNPSLKGKPVVVCVFSGRFEDSGAVATANYEARKFGVKAGIPIVEAKKILPNAVYLPMRKEVYQQVSCRIMNLLREYSEKIEIASIDEAYLDISDKVRDYREAYNLGLEIKNKILEKEKITVTVGISKNKVFAKIACDMAKPNGIKVIDDEEVKRLIRELDIADVPGIGNITAEKLKKLGINKLVDTLSIEFDKLKGMIGEAKAKYLISLARDEYNEPIRTRVRKSIGRIVTMKRNSRNLEEIKPYLFRAIEESYYKLDKRIPKAIHVVAVTEDLDIVSRGRTFPHGISKETAYSESVKLLQKILEEDERKIRRIGVRFSKFIEA

SEQ ID NO: 224 - protein, 343 aa, Artificial
  Synthetic
MIVLFVDFDYFYAQVEEVLNPSLKGKPVVVSVFSGRFEDSGAVATANYEARKFGVKAGIPIVEAKKILPNAVYLPMRKEVYQQVSSRIMNLLREYSEKIEIASIDEAYLDISDKVRDYREAYNLGLEIKNKILEKEKITVTVGISKNKVFAKIACDMAKPNGIKVIDDEEVKRLIRELDIADVPGIGNITAEKLKKLGINKLVDTLSIEFDKLKGMIGEAKAKYLISLARDEYNEPIRTRVRKSIGRIVTMKRNSRNLEEIKPYLFRAIEESYYKLDKRIPKAIHVVAVTEDLDIVSRGRTFPHGISKETAYSESVKLLQKILEEDERKIRRIGVRFSKFIEA

SEQ ID NO: 225 - protein, 343 aa, Artificial
  Synthetic
MIVLFVDFDYFYAQVEEVLNPSLKGKPVVVCVFSGRFEDSGAVATANYEARKFGVKAGIPIVEAKKILPNAVYLPGRKEVYQQVSSRIMNLLREYSEKIEIASIDEAYLDISDKVRDYREAYNLGLEIKNKILEKEKITVTVGISKNKVFAKIACDMAKPNGIKVIDDEEVKRLIRELDIADVPGIGNITAEKLKKLGINKLVDTLSIEFDKLKGMIGEAKAKYLISLARDEYNEPIRTRVRKSIGRIVTMKRNSRNLEEIKPYLFRAIEESYYKLDKRIPKAIHVVAVTEDLDIVSRGRTFPHGISKETAYSESVKLLQKILEEDERKIRRIGVRFSKFIEA

SEQ ID NO: 226 - protein, 343 aa, Artificial
  Synthetic
MIVLFVDFDYFYAQVEEVLNPSLKGKPVVVCVFSGRFEDSGAVATANYEARKFGVKAGIPIVEAKKILPNAVYLPARKEVYQQVSSRIMNLLREYSEKIEIASIDEAYLDISDKVRDYREAYNLGLEIKNKILEKEKITVTVGISKNKVFAKIACDMAKPNGIKVIDDEEVKRLIRELDIADVPGIGNITAEKLKKLGINKLVDTLSIEFDKLKGMIGEAKAKYLISLARDEYNEPIRTRVRKSIGRIVTMKRNSRNLEEIKPYLFRAIEESYYKLDKRIPKAIHVVAVTEDLDIVSRGRTFPHGISKETAYSESVKLLQKILEEDERKIRRIGVRFSKFIEA

SEQ ID NO: 227 - protein, 343 aa, Artificial
  Synthetic
MIVLFVDFDYFYAQVEEVLNPSLKGKPVVVCVFSGRFEDSGAVATANYEARKFGVKAGIPIVEAKKCLPNAVYLPMRKEVYQQVSSRIMNLLREYSEKIEIASIDEAYLDISDKVRDYREAYNLGLEIKNKILEKEKITVTVGISKNKVFAKIACDMAKPNGIKVIDDEEVKRLIRELDIADVPGIGNITAEKLKKLGINKLVDTLSIEFDKLKGMIGEAKAKYLISLARDEYNEPIRTRVRKSIGRIVTMKRNSRNLEEIKPYLFRAIEESYYKLDKRIPKAIHVVAVTEDLDIVSRGRTFPHGISKETAYSESVKLLQKILEEDERKIRRIGVRFSKFIEA

SEQ ID NO: 228 - protein, 343 aa, Artificial
  Synthetic
MIVLFVDFDYFYAQVEEVLNPSLKGKPVVVCVFSGRFEDSGAVATANYEARKFGVKAGIPIVEAKKILPNAVYLPMRKEVYQQVSGRIMNLLREYSEKIEIASIDEAYLDISDKVRDYREAYNLGLEIKNKILEKEKITVTVGISKNKVFAKIACDMAKPNGIKVIDDEEVKRLIRELDIADVPGIGNITAEKLKKLGINKLVDTLSIEFDKLKGMIGEAKAKYLISLARDEYNEPIRTRVRKSIGRIVTMKRNSRNLEEIKPYLFRAIEESYYKLDKRIPKAIHVVAVTEDLDIVSRGRTFPHGISKETAYSESVKLLQKILEEDERKIRRIGVRFSKFIEA

SEQ ID NO: 229 - protein, 343 aa, Artificial
  Synthetic
MIVLFVDFDYFYAQVEEVLNPSLKGKPVVVCVFSGRFEDSGAVATANYEARKFGVKAGIPIVEAKKILPNAVYLPMRKEVYQQVSSRIMNLLREYGEKIEIASIDEAYLDISDKVRDYREAYNLGLEIKNKILEKEKITVTVGISKNKVFAKIACDMAKPNGIKVIDDEEVKRLIRELDIADVPGIGNITAEKLKKLGINKLVDTLSIEFDKLKGMIGEAKAKYLISLARDEYNEPIRTRVRKSIGRIVTMKRNSRNLEEIKPYLFRAIEESYYKLDKRIPKAIHVVAVTEDLDIVSRGRTFPHGISKETAYSESVKLLQKILEEDERKIRRIGVRFSKFIEA

SEQ ID NO: 230 - protein, 343 aa, Artificial
  Synthetic
MIVLFVDFDYFYAQVEEVLNPSLKGKPVVVCVFSGRFEDSGAVATANYEARKFGVKAGIPIVEAKKILPNCVYLPMRKEVYQQVSSRIMNLLREYSEKIEIASIDEAYLDISDKVRDYREAYNLGLEIKNKILEKEKITVTVGISKNKVFAKIAADMAKPNGIKVIDDEEVKRLIRELDIADVPGIGNITAEKLKKLGINKLCDTLSIEFDKLKGMIGEAKAKYLISLARDEYNEPIRTRVRKSIGRIVTMKRNSRNLEEIKPYLFRAIEESYYKLDKRIPKAIHVVAVTEDLDIVSRGRTFPHGISKETAYSESVKLLQKILEEDERKIRRIGVRFSKFIEA

SEQ ID NO: 231 - protein, 343 aa, Artificial
  Synthetic
MIVLFVDFDYFYAQVEEVLNPSLKGKPVVVCVFSGRFEDSGAVATANYEARKFGVKAGIPIVEAKKILPNAVYLPMRKEVYQQVSCRIMNLLREYSEKIEIASIDEAYLDISDKVRDYREAYNLGLEIKNKILEKEKITVTVGISKNKVFAKIAADMAKPNGIKVIDDEEVKRLIRELDIADVPGIGNITAEKLKKLGINKLCDTLSIEFDKLKGMIGEAKAKYLISLARDEYNEPIRTRVRKSIGRIVTMKRNSRNLEEIKPYLFRAIEESYYKLDKRIPKAIHVVAVTEDLDIVSRGRTFPHGISKETAYSESVKLLQKILEEDERKIRRIGVRFSKFIEA

SEQ ID NO: 232 - protein, 343 aa, Artificial
  Synthetic
MIVLFVDFDYFYAQVEEVLNPSLKGKPVVVSVFSGRFEDSGAVATANYEARKFGVKAGIPIVEAKKILPNAVYLPMRKEVYQQVSSRIMNLLREYSEKIEIASIDEAYLDISDKVRDYREAYNLGLEIKNKILEKEKITVTVGISKNKVFAKIAADMAKPNGIKVIDDEEVKRLIRELDIADVPGIGNITAEKLKKLGINKLCDTLSIEFDKLKGMIGEAKAKYLISLARDEYNEPIRTRVRKSIGRIVTMKRNSRNLEEIKPYLFRAIEESYYKLDKRIPKAIHVVAVTEDLDIVSRGRTFPHGISKETAYSESVKLLQKILEEDERKIRRIGVRFSKFIEA

SEQ ID NO: 233 - protein, 343 aa, Artificial
  Synthetic
MIVLFVDFDYFYAQVEEVLNPSLKGKPVVVCVFSGRFEDSGAVATANYEARKFGVKAGIPIVEAKKILPNAVYLPGRKEVYQQVSSRIMNLLREYSEKIEIASIDEAYLDISDKVRDYREAYNLGLEIKNKILEKEKITVTVGISKNKVFAKIAADMAKPNGIKVIDDEEVKRLIRELDIADVPGIGNITAEKLKKLGINKLCDTLSIEFDKLKGMIGEAKAKYLISLARDEYNEPIRTRVRKSIGRIVTMKRNSRNLEEIKPYLFRAIEESYYKLDKRIPKAIHVVAVTEDLDIVSRGRTFPHGISKETAYSESVKLLQKILEEDERKIRRIGVRFSKFIEA

SEQ ID NO: 234 - protein, 343 aa, Artificial
  Synthetic
MIVLFVDFDYFYAQVEEVLNPSLKGKPVVVCVFSGRFEDSGAVATANYEARKFGVKAGIPIVEAKKILPNAVYLPARKEVYQQVSSRIMNLLREYSEKIEIASIDEAYLDISDKVRDYREAYNLGLEIKNKILEKEKITVTVGISKNKVFAKIAADMAKPNGIKVIDDEEVKRLIRELDIADVPGIGNITAEKLKKLGINKLCDTLSIEFDKLKGMIGEAKAKYLISLARDEYNEPIRTRVRKSIGRIVTMKRNSRNLEEIKPYLFRAIEESYYKLDKRIPKAIHVVAVTEDLDIVSRGRTFPHGISKETAYSESVKLLQKILEEDERKIRRIGVRFSKFIEA

SEQ ID NO: 235 - protein, 343 aa, Artificial
  Synthetic
MIVLFVDFDYFYAQVEEVLNPSLKGKPVVVCVFSGRFEDSGAVATANYEARKFGVKAGIPIVEAKKCLPNAVYLPMRKEVYQQVSSRIMNLLREYSEKIEIASIDEAYLDISDKVRDYREAYNLGLEIKNKILEKEKITVTVGISKNKVFAKIAADMAKPNGIKVIDDEEVKRLIRELDIADVPGIGNITAEKLKKLGINKLCDTLSIEFDKLKGMIGEAKAKYLISLARDEYNEPIRTRVRKSIGRIVTMKRNSRNLEEIKPYLFRAIEESYYKLDKRIPKAIHVVAVTEDLDIVSRGRTFPHGISKETAYSESVKLLQKILEEDERKIRRIGVRFSKFIEA

SEQ ID NO: 236 - protein, 343 aa, Artificial
  Synthetic
MIVLFVDFDYFYAQVEEVLNPSLKGKPVVVCVFSGRFEDSGAVATANYEARKFGVKAGIPIVEAKKILPNAVYLPMRKEVYQQVSGRIMNLLREYSEKIEIASIDEAYLDISDKVRDYREAYNLGLEIKNKILEKEKITVTVGISKNKVFAKIAADMAKPNGIKVIDDEEVKRLIRELDIADVPGIGNITAEKLKKLGINKLCDTLSIEFDKLKGMIGEAKAKYLISLARDEYNEPIRTRVRKSIGRIVTMKRNSRNLEEIKPYLFRAIEESYYKLDKRIPKAIHVVAVTEDLDIVSRGRTFPHGISKETAYSESVKLLQKILEEDERKIRRIGVRFSKFIEA

SEQ ID NO: 237 - protein, 343 aa, Artificial
  Synthetic
MIVLFVDFDYFYAQVEEVLNPSLKGKPVVVCVFSGRFEDSGAVATANYEARKFGVKAGIPIVEAKKILPNAVYLPMRKEVYQQVSSRIMNLLREYGEKIEIASIDEAYLDISDKVRDYREAYNLGLEIKNKILEKEKITVTVGISKNKVFAKIAADMAKPNGIKVIDDEEVKRLIRELDIADVPGIGNITAEKLKKLGINKLCDTLSIEFDKLKGMIGEAKAKYLISLARDEYNEPIRTRVRKSIGRIVTMKRNSRNLEEIKPYLFRAIEESYYKLDKRIPKAIHVVAVTEDLDIVSRGRTFPHGISKETAYSESVKLLQKILEEDERKIRRIGVRFSKFIEA

SEQ ID NO: 238 - protein, 343 aa, Artificial; identical to SEQ ID NO: 224
  Synthetic

SEQ ID NO: 239 - protein, 343 aa, Artificial; identical to SEQ ID NO: 232
  Synthetic

SEQ ID NO: 240 - protein, 343 aa, Artificial; identical to SEQ ID NO: 216
  Synthetic

SEQ ID NO: 241 - protein, 340 aa, Artificial
  Synthetic
MIVLFVDFDYFYAQVEEVLNPSLKGKPVVVCVFSGRFEDSGAVATANYEARKFGVKAGIPIVEAKKILPNAVYLPMRKEVYQQVSSRIMNLLREYSEKIEIASIDEAYLDISDKVRDYREAYNLGLEIKNKILEKEKITVTVGISKNKVFAKIAADMAKPNGIKVIDDEEVKRLIRELDIADVPGIGNITAEKLKKLGINKLVDTLSIEFDKLKGMIGEAKAKYLISLARDEYNEPIRTRVRKSIGRIVTMKRNSRNLEEIKPYLFRAIEESYYKLDKRIPKAIHVVAVTEDLDIVSRGRTFPHGISKETAYSESVKLLQKILEEDERKIRRIGVRFSKF

SEQ ID NO: 242 - protein, 340 aa, Artificial
  Synthetic
MIVLFVDFDYFYAQVEEVLNPSLKGKPVVVCVFSGRFEDSGAVATANYEARKFGVKAGIPIVEAKKILPNAVYLPMRKEVYQQVSSRIMNLLREYSEKIEIASIDEAYLDISDKVRDYREAYNLGLEIKNKILEKEKITVTVGISKNKVFAKIACDMAKPNGIKVIDDEEVKRLIRELDIADVPGIGNITAEKLKKLGINKLVDTLSIEFDKLKGMIGEAKAKYLISLARDEYNEPIRTRVRKSIGRIVTMKRNSRNLEEIKPYLFRAIEESYYKLDKRIPKAIHVVAVTEDLDIVSRGRTFPHGISKETAYSESVKLLQKILEEDERKIRRIGVRFSKF

SEQ ID NO: 243 - protein, 340 aa, Artificial
  Synthetic
MIVLFVDFDYFYAQVEEVLNPSLKGKPVVVCVFSGRFEDSGAVATANYEARKFGVKAGIPIVEAKKILPNAVYLPMRKEVYQQVSSRIMNLLREYSEKIEIASIDEAYLDISDKVRDYREAYNLGLEIKNKILEKEKITVTVGISKNKVFAKIAADMAKPNGIKVIDDEEVKRLIRELDIADVPGIGNITAEKLKKLGINKLCDTLSIEFDKLKGMIGEAKAKYLISLARDEYNEPIRTRVRKSIGRIVTMKRNSRNLEEIKPYLFRAIEESYYKLDKRIPKAIHVVAVTEDLDIVSRGRTFPHGISKETAYSESVKLLQKILEEDERKIRRIGVRFSKF

SEQ ID NO: 244 - protein, 340 aa, Artificial
  Synthetic
MIVLFVDFDYFYAQVEEVLNPSLKGKPVVVCVFSGRFEDSGAVATANYEARKFGVKAGIPIVEAKKILPNAVYLPMRKEVYQQVSSRIMNLLREYSEKIEIASIDEAYLDISDKVRDYREAYNLGLEIKNKILEKEKITVTVGISKNKVFAKIACDMAKPNGIKVIDDEEVKRLIRELDIADVPGIGNITAEKLKKLGINKLCDTLSIEFDKLKGMIGEAKAKYLISLARDEYNEPIRTRVRKSIGRIVTMKRNSRNLEEIKPYLFRAIEESYYKLDKRIPKAIHVVAVTEDLDIVSRGRTFPHGISKETAYSESVKLLQKILEEDERKIRRIGVRFSKF

SEQ ID NO: 245 - protein, 340 aa, Artificial
  Synthetic
MIVLFVDFDYFYAQVEEVLNPSLKGKPVVVSVFSGRFEDSGAVATANYEARKFGVKAGIPIVEAKKILPNAVYLPMRKEVYQQVSSRIMNLLREYSEKIEIASIDEAYLDISDKVRDYREAYNLGLEIKNKILEKEKITVTVGISKNKVFAKIAADMAKPNGIKVIDDEEVKRLIRELDIADVPGIGNITAEKLKKLGINKLVDTLSIEFDKLKGMIGEAKAKYLISLARDEYNEPIRTRVRKSIGRIVTMKRNSRNLEEIKPYLFRAIEESYYKLDKRIPKAIHVVAVTEDLDIVSRGRTFPHGISKETAYSESVKLLQKILEEDERKIRRIGVRFSKF

SEQ ID NO: 246 - protein, 340 aa, Artificial
  Synthetic
MIVLFVDFDYFYAQVEEVLNPSLKGKPVVVCVFSGRFEDSGAVATANYEARKFGVKAGIPIVEAKKILPNAVYLPMRKEVYQQVCSRIMNLLREYSEKIEIASIDEAYLDISDKVRDYREAYNLGLEIKNKILEKEKITVTVGISKNKVFAKIAADMAKPNGIKVIDDEEVKRLIRELDIADVPGIGNITAEKLKKLGINKLVDTLSIEFDKLKGMIGEAKAKYLISLARDEYNEPIRTRVRKSIGRIVTMKRNSRNLEEIKPYLFRAIEESYYKLDKRIPKAIHVVAVTEDLDIVSRGRTFPHGISKETAYSESVKLLQKILEEDERKIRRIGVRFSKF

SEQ ID NO: 247 - protein, 340 aa, Artificial
  Synthetic
MIVLFVDFDYFYAQVEEVLNPSLKGKPVVVCVFSGRFEDSGAVATANYEARKFGVKAGIPIVEAKKILPNAVYLPMRKEVYQQVSCRIMNLLREYSEKIEIASIDEAYLDISDKVRDYREAYNLGLEIKNKILEKEKITVTVGISKNKVFAKIAADMAKPNGIKVIDDEEVKRLIRELDIADVPGIGNITAEKLKKLGINKLVDTLSIEFDKLKGMIGEAKAKYLISLARDEYNEPIRTRVRKSIGRIVTMKRNSRNLEEIKPYLFRAIEESYYKLDKRIPKAIHVVAVTEDLDIVSRGRTFPHGISKETAYSESVKLLQKILEEDERKIRRIGVRFSKF

SEQ ID NO: 248 - protein, 340 aa, Artificial
  Synthetic
MIVLFVDFDYFYAQVEEVLNPSLKGKPVVVCVFSGRFEDSGAVATANYEARKFGVKAGIPIVEAKKILPNAVYLPMRKEVYQQVSSRIMNLLREYCEKIEIASIDEAYLDISDKVRDYREAYNLGLEIKNKILEKEKITVTVGISKNKVFAKIAADMAKPNGIKVIDDEEVKRLIRELDIADVPGIGNITAEKLKKLGINKLVDTLSIEFDKLKGMIGEAKAKYLISLARDEYNEPIRTRVRKSIGRIVTMKRNSRNLEEIKPYLFRAIEESYYKLDKRIPKAIHVVAVTEDLDIVSRGRTFPHGISKETAYSESVKLLQKILEEDERKIRRIGVRFSKF

SEQ ID NO: 249 - protein, 340 aa, Artificial
  Synthetic
MIVLFVDFDYFYAQVEEVLNPSLKGKPVVVCVFSGRFEDSGAVATANYEARKFGVKAGIPIVEAKKILPNCVYLPMRKEVYQQVSSRIMNLLREYSEKIEIASIDEAYLDISDKVRDYREAYNLGLEIKNKILEKEKITVTVGISKNKVFAKIAADMAKPNGIKVIDDEEVKRLIRELDIADVPGIGNITAEKLKKLGINKLVDTLSIEFDKLKGMIGEAKAKYLISLARDEYNEPIRTRVRKSIGRIVTMKRNSRNLEEIKPYLFRAIEESYYKLDKRIPKAIHVVAVTEDLDIVSRGRTFPHGISKETAYSESVKLLQKILEEDERKIRRIGVRFSKF

SEQ ID NO: 250 - protein, 340 aa, Artificial
  Synthetic
MIVLFVDFDYFYAQVEEVLNPSLKGKPVVVCVFSGRFEDSGAVATANYEARKFGVKAGIPIVEAKKILPNAVYLPGRKEVYQQVSSRIMNLLREYSEKIEIASIDEAYLDISDKVRDYREAYNLGLEIKNKILEKEKITVTVGISKNKVFAKIAADMAKPNGIKVIDDEEVKRLIRELDIADVPGIGNITAEKLKKLGINKLVDTLSIEFDKLKGMIGEAKAKYLISLARDEYNEPIRTRVRKSIGRIVTMKRNSRNLEEIKPYLFRAIEESYYKLDKRIPKAIHVVAVTEDLDIVSRGRTFPHGISKETAYSESVKLLQKILEEDERKIRRIGVRFSKF

SEQ ID NO: 251 - protein, 340 aa, Artificial
  Synthetic
MIVLFVDFDYFYAQVEEVLNPSLKGKPVVVCVFSGRFEDSGAVATANYEARKFGVKAGIPIVEAKKILPNAVYLPARKEVYQQVSSRIMNLLREYSEKIEIASIDEAYLDISDKVRDYREAYNLGLEIKNKILEKEKITVTVGISKNKVFAKIAADMAKPNGIKVIDDEEVKRLIRELDIADVPGIGNITAEKLKKLGINKLVDTLSIEFDKLKGMIGEAKAKYLISLARDEYNEPIRTRVRKSIGRIVTMKRNSRNLEEIKPYLFRAIEESYYKLDKRIPKAIHVVAVTEDLDIVSRGRTFPHGISKETAYSESVKLLQKILEEDERKIRRIGVRFSKF

SEQ ID NO: 252 - protein, 340 aa, Artificial
  Synthetic
MIVLFVDFDYFYAQVEEVLNPSLKGKPVVVCVFSGRFEDSGAVATANYEARKFGVKAGIPIVEAKKCLPNAVYLPMRKEVYQQVSSRIMNLLREYSEKIEIASIDEAYLDISDKVRDYREAYNLGLEIKNKILEKEKITVTVGISKNKVFAKIAADMAKPNGIKVIDDEEVKRLIRELDIADVPGIGNITAEKLKKLGINKLVDTLSIEFDKLKGMIGEAKAKYLISLARDEYNEPIRTRVRKSIGRIVTMKRNSRNLEEIKPYLFRAIEESYYKLDKRIPKAIHVVAVTEDLDIVSRGRTFPHGISKETAYSESVKLLQKILEEDERKIRRIGVRFSKF

SEQ ID NO: 253 - protein, 340 aa, Artificial
  Synthetic
MIVLFVDFDYFYAQVEEVLNPSLKGKPVVVCVFSGRFEDSGAVATANYEARKFGVKAGIPIVEAKKILPNAVYLPMRKEVYQQVSGRIMNLLREYSEKIEIASIDEAYLDISDKVRDYREAYNLGLEIKNKILEKEKITVTVGISKNKVFAKIAADMAKPNGIKVIDDEEVKRLIRELDIADVPGIGNITAEKLKKLGINKLVDTLSIEFDKLKGMIGEAKAKYLISLARDEYNEPIRTRVRKSIGRIVTMKRNSRNLEEIKPYLFRAIEESYYKLDKRIPKAIHVVAVTEDLDIVSRGRTFPHGISKETAYSESVKLLQKILEEDERKIRRIGVRFSKF

SEQ ID NO: 254 - protein, 340 aa, Artificial
  Synthetic
MIVLFVDFDYFYAQVEEVLNPSLKGKPVVVCVFSGRFEDSGAVATANYEARKFGVKAGIPIVEAKKILPNCVYLPMRKEVYQQVSSRIMNLLREYSEKIEIASIDEAYLDISDKVRDYREAYNLGLEIKNKILEKEKITVTVGISKNKVFAKIACDMAKPNGIKVIDDEEVKRLIRELDIADVPGIGNITAEKLKKLGINKLCDTLSIEFDKLKGMIGEAKAKYLISLARDEYNEPIRTRVRKSIGRIVTMKRNSRNLEEIKPYLFRAIEESYYKLDKRIPKAIHVVAVTEDLDIVSRGRTFPHGISKETAYSESVKLLQKILEEDERKIRRIGVRFSKF

SEQ ID NO: 255 - protein, 340 aa, Artificial
  Synthetic
MIVLFVDFDYFYAQVEEVLNPSLKGKPVVVCVFSGRFEDSGAVATANYEARKFGVKAGIPIVEAKKILPNAVYLPMRKEVYQQVSCRIMNLLREYSEKIEIASIDEAYLDISDKVRDYREAYNLGLEIKNKILEKEKITVTVGISKNKVFAKIACDMAKPNGIKVIDDEEVKRLIRELDIADVPGIGNITAEKLKKLGINKLCDTLSIEFDKLKGMIGEAKAKYLISLARDEYNEPIRTRVRKSIGRIVTMKRNSRNLEEIKPYLFRAIEESYYKLDKRIPKAIHVVAVTEDLDIVSRGRTFPHGISKETAYSESVKLLQKILEEDERKIRRIGVRFSKF

SEQ ID NO: 256 - protein, 340 aa, Artificial
  Synthetic
MIVLFVDFDYFYAQVEEVLNPSLKGKPVVVSVFSGRFEDSGAVATANYEARKFGVKAGIPIVEAKKILPNAVYLPMRKEVYQQVSSRIMNLLREYSEKIEIASIDEAYLDISDKVRDYREAYNLGLEIKNKILEKEKITVTVGISKNKVFAKIACDMAKPNGIKVIDDEEVKRLIRELDIADVPGIGNITAEKLKKLGINKLCDTLSIEFDKLKGMIGEAKAKYLISLARDEYNEPIRTRVRKSIGRIVTMKRNSRNLEEIKPYLFRAIEESYYKLDKRIPKAIHVVAVTEDLDIVSRGRTFPHGISKETAYSESVKLLQKILEEDERKIRRIGVRFSKF

SEQ ID NO: 257 - protein, 340 aa, Artificial
  Synthetic
MIVLFVDFDYFYAQVEEVLNPSLKGKPVVVCVFSGRFEDSGAVATANYEARKFGVKAGIPIVEAKKILPNAVYLPGRKEVYQQVSSRIMNLLREYSEKIEIASIDEAYLDISDKVRDYREAYNLGLEIKNKILEKEKITVTVGISKNKVFAKIACDMAKPNGIKVIDDEEVKRLIRELDIADVPGIGNITAEKLKKLGINKLCDTLSIEFDKLKGMIGEAKAKYLISLARDEYNEPIRTRVRKSIGRIVTMKRNSRNLEEIKPYLFRAIEESYYKLDKRIPKAIHVVAVTEDLDIVSRGRTFPHGISKETAYSESVKLLQKILEEDERKIRRIGVRFSKF

SEQ ID NO: 258 - protein, 340 aa, Artificial
  Synthetic
MIVLFVDFDYFYAQVEEVLNPSLKGKPVVVCVFSGRFEDSGAVATANYEARKFGVKAGIPIVEAKKILPNAVYLPARKEVYQQVSSRIMNLLREYSEKIEIASIDEAYLDISDKVRDYREAYNLGLEIKNKILEKEKITVTVGISKNKVFAKIACDMAKPNGIKVIDDEEVKRLIRELDIADVPGIGNITAEKLKKLGINKLCDTLSIEFDKLKGMIGEAKAKYLISLARDEYNEPIRTRVRKSIGRIVTMKRNSRNLEEIKPYLFRAIEESYYKLDKRIPKAIHVVAVTEDLDIVSRGRTFPHGISKETAYSESVKLLQKILEEDERKIRRIGVRFSKF

SEQ ID NO: 259 - protein, 340 aa, Artificial
  Synthetic
MIVLFVDFDYFYAQVEEVLNPSLKGKPVVVCVFSGRFEDSGAVATANYEARKFGVKAGIPIVEAKKCLPNAVYLPMRKEVYQQVSSRIMNLLREYSEKIEIASIDEAYLDISDKVRDYREAYNLGLEIKNKILEKEKITVTVGISKNKVFAKIACDMAKPNGIKVIDDEEVKRLIRELDIADVPGIGNITAEKLKKLGINKLCDTLSIEFDKLKGMIGEAKAKYLISLARDEYNEPIRTRVRKSIGRIVTMKRNSRNLEEIKPYLFRAIEESYYKLDKRIPKAIHVVAVTEDLDIVSRGRTFPHGISKETAYSESVKLLQKILEEDERKIRRIGVRFSKF

SEQ ID NO: 260 - protein, 340 aa, Artificial
  Synthetic
MIVLFVDFDYFYAQVEEVLNPSLKGKPVVVCVFSGRFEDSGAVATANYEARKFGVKAGIPIVEAKKILPNAVYLPMRKEVYQQVSGRIMNLLREYSEKIEIASIDEAYLDISDKVRDYREAYNLGLEIKNKILEKEKITVTVGISKNKVFAKIACDMAKPNGIKVIDDEEVKRLIRELDIADVPGIGNITAEKLKKLGINKLCDTLSIEFDKLKGMIGEAKAKYLISLARDEYNEPIRTRVRKSIGRIVTMKRNSRNLEEIKPYLFRAIEESYYKLDKRIPKAIHVVAVTEDLDIVSRGRTFPHGISKETAYSESVKLLQKILEEDERKIRRIGVRFSKF

SEQ ID NO: 261 - protein, 340 aa, Artificial
  Synthetic
MIVLFVDFDYFYAQVEEVLNPSLKGKPVVVCVFSGRFEDSGAVATANYEARKFGVKAGIPIVEAKKILPNAVYLPMRKEVYQQVSSRIMNLLREYGEKIEIASIDEAYLDISDKVRDYREAYNLGLEIKNKILEKEKITVTVGISKNKVFAKIACDMAKPNGIKVIDDEEVKRLIRELDIADVPGIGNITAEKLKKLGINKLCDTLSIEFDKLKGMIGEAKAKYLISLARDEYNEPIRTRVRKSIGRIVTMKRNSRNLEEIKPYLFRAIEESYYKLDKRIPKAIHVVAVTEDLDIVSRGRTFPHGISKETAYSESVKLLQKILEEDERKIRRIGVRFSKF

SEQ ID NO: 262 - protein, 340 aa, Artificial
  Synthetic
MIVLFVDFDYFYAQVEEVLNPSLKGKPVVVCVFSGRFEDSGAVATANYEARKFGVKAGIPIVEAKKILPNCVYLPMRKEVYQQVSSRIMNLLREYSEKIEIASIDEAYLDISDKVRDYREAYNLGLEIKNKILEKEKITVTVGISKNKVFAKIACDMAKPNGIKVIDDEEVKRLIRELDIADVPGIGNITAEKLKKLGINKLVDTLSIEFDKLKGMIGEAKAKYLISLARDEYNEPIRTRVRKSIGRIVTMKRNSRNLEEIKPYLFRAIEESYYKLDKRIPKAIHVVAVTEDLDIVSRGRTFPHGISKETAYSESVKLLQKILEEDERKIRRIGVRFSKF

SEQ ID NO: 263 - protein, 340 aa, Artificial
  Synthetic
MIVLFVDFDYFYAQVEEVLNPSLKGKPVVVCVFSGRFEDSGAVATANYEARKFGVKAGIPIVEAKKILPNAVYLPMRKEVYQQVSCRIMNLLREYSEKIEIASIDEAYLDISDKVRDYREAYNLGLEIKNKILEKEKITVTVGISKNKVFAKIACDMAKPNGIKVIDDEEVKRLIRELDIADVPGIGNITAEKLKKLGINKLVDTLSIEFDKLKGMIGEAKAKYLISLARDEYNEPIRTRVRKSIGRIVTMKRNSRNLEEIKPYLFRAIEESYYKLDKRIPKAIHVVAVTEDLDIVSRGRTFPHGISKETAYSESVKLLQKILEEDERKIRRIGVRFSKF

SEQ ID NO: 264 - protein, 340 aa, Artificial
  Synthetic
MIVLFVDFDYFYAQVEEVLNPSLKGKPVVVSVFSGRFEDSGAVATANYEARKFGVKAGIPIVEAKKILPNAVYLPMRKEVYQQVSSRIMNLLREYSEKIEIASIDEAYLDISDKVRDYREAYNLGLEIKNKILEKEKITVTVGISKNKVFAKIACDMAKPNGIKVIDDEEVKRLIRELDIADVPGIGNITAEKLKKLGINKLVDTLSIEFDKLKGMIGEAKAKYLISLARDEYNEPIRTRVRKSIGRIVTMKRNSRNLEEIKPYLFRAIEESYYKLDKRIPKAIHVVAVTEDLDIVSRGRTFPHGISKETAYSESVKLLQKILEEDERKIRRIGVRFSKF

SEQ ID NO: 265 - protein, 340 aa, Artificial
  Synthetic
MIVLFVDFDYFYAQVEEVLNPSLKGKPVVVCVFSGRFEDSGAVATANYEARKFGVKAGIPIVEAKKILPNAVYLPGRKEVYQQVSSRIMNLLREYSEKIEIASIDEAYLDISDKVRDYREAYNLGLEIKNKILEKEKITVTVGISKNKVFAKIACDMAKPNGIKVIDDEEVKRLIRELDIADVPGIGNITAEKLKKLGINKLVDTLSIEFDKLKGMIGEAKAKYLISLARDEYNEPIRTRVRKSIGRIVTMKRNSRNLEEIKPYLFRAIEESYYKLDKRIPKAIHVVAVTEDLDIVSRGRTFPHGISKETAYSESVKLLQKILEEDERKIRRIGVRFSKF

SEQ ID NO: 266 - protein, 340 aa, Artificial
  Synthetic
MIVLFVDFDYFYAQVEEVLNPSLKGKPVVVCVFSGRFEDSGAVATANYEARKFGVKAGIPIVEAKKILPNAVYLPARKEVYQQVSSRIMNLLREYSEKIEIASIDEAYLDISDKVRDYREAYNLGLEIKNKILEKEKITVTVGISKNKVFAKIACDMAKPNGIKVIDDEEVKRLIRELDIADVPGIGNITAEKLKKLGINKLVDTLSIEFDKLKGMIGEAKAKYLISLARDEYNEPIRTRVRKSIGRIVTMKRNSRNLEEIKPYLFRAIEESYYKLDKRIPKAIHVVAVTEDLDIVSRGRTFPHGISKETAYSESVKLLQKILEEDERKIRRIGVRFSKF

SEQ ID NO: 267 - protein, 340 aa, Artificial
  Synthetic
MIVLFVDFDYFYAQVEEVLNPSLKGKPVVVCVFSGRFEDSGAVATANYEARKFGVKAGIPIVEAKKCLPNAVYLPMRKEVYQQVSSRIMNLLREYSEKIEIASIDEAYLDISDKVRDYREAYNLGLEIKNKILEKEKITVTVGISKNKVFAKIACDMAKPNGIKVIDDEEVKRLIRELDIADVPGIGNITAEKLKKLGINKLVDTLSIEFDKLKGMIGEAKAKYLISLARDEYNEPIRTRVRKSIGRIVTMKRNSRNLEEIKPYLFRAIEESYYKLDKRIPKAIHVVAVTEDLDIVSRGRTFPHGISKETAYSESVKLLQKILEEDERKIRRIGVRFSKF

SEQ ID NO: 268 - protein, 340 aa, Artificial
  Synthetic
MIVLFVDFDYFYAQVEEVLNPSLKGKPVVVCVFSGRFEDSGAVATANYEARKFGVKAGIPIVEAKKILPNAVYLPMRKEVYQQVSGRIMNLLREYSEKIEIASIDEAYLDISDKVRDYREAYNLGLEIKNKILEKEKITVTVGISKNKVFAKIACDMAKPNGIKVIDDEEVKRLIRELDIADVPGIGNITAEKLKKLGINKLVDTLSIEFDKLKGMIGEAKAKYLISLARDEYNEPIRTRVRKSIGRIVTMKRNSRNLEEIKPYLFRAIEESYYKLDKRIPKAIHVVAVTEDLDIVSRGRTFPHGISKETAYSESVKLLQKILEEDERKIRRIGVRFSKF

SEQ ID NO: 269 - protein, 340 aa, Artificial
  Synthetic
MIVLFVDFDYFYAQVEEVLNPSLKGKPVVVCVFSGRFEDSGAVATANYEARKFGVKAGIPIVEAKKILPNAVYLPMRKEVYQQVSSRIMNLLREYGEKIEIASIDEAYLDISDKVRDYREAYNLGLEIKNKILEKEKITVTVGISKNKVFAKIACDMAKPNGIKVIDDEEVKRLIRELDIADVPGIGNITAEKLKKLGINKLVDTLSIEFDKLKGMIGEAKAKYLISLARDEYNEPIRTRVRKSIGRIVTMKRNSRNLEEIKPYLFRAIEESYYKLDKRIPKAIHVVAVTEDLDIVSRGRTFPHGISKETAYSESVKLLQKILEEDERKIRRIGVRFSKF

SEQ ID NO: 270 - protein, 340 aa, Artificial
  Synthetic
MIVLFVDFDYFYAQVEEVLNPSLKGKPVVVCVFSGRFEDSGAVATANYEARKFGVKAGIPIVEAKKILPNCVYLPMRKEVYQQVSSRIMNLLREYSEKIEIASIDEAYLDISDKVRDYREAYNLGLEIKNKILEKEKITVTVGISKNKVFAKIAADMAKPNGIKVIDDEEVKRLIRELDIADVPGIGNITAEKLKKLGINKLCDTLSIEFDKLKGMIGEAKAKYLISLARDEYNEPIRTRVRKSIGRIVTMKRNSRNLEEIKPYLFRAIEESYYKLDKRIPKAIHVVAVTEDLDIVSRGRTFPHGISKETAYSESVKLLQKILEEDERKIRRIGVRFSKF

SEQ ID NO: 271 - protein, 340 aa, Artificial
  Synthetic
MIVLFVDFDYFYAQVEEVLNPSLKGKPVVVCVFSGRFEDSGAVATANYEARKFGVKAGIPIVEAKKILPNAVYLPMRKEVYQQVSCRIMNLLREYSEKIEIASIDEAYLDISDKVRDYREAYNLGLEIKNKILEKEKITVTVGISKNKVFAKIAADMAKPNGIKVIDDEEVKRLIRELDIADVPGIGNITAEKLKKLGINKLCDTLSIEFDKLKGMIGEAKAKYLISLARDEYNEPIRTRVRKSIGRIVTMKRNSRNLEEIKPYLFRAIEESYYKLDKRIPKAIHVVAVTEDLDIVSRGRTFPHGISKETAYSESVKLLQKILEEDERKIRRIGVRFSKF

SEQ ID NO: 272 - protein, 340 aa, Artificial
  Synthetic
MIVLFVDFDYFYAQVEEVLNPSLKGKPVVVSVFSGRFEDSGAVATANYEARKFGVKAGIPIVEAKKILPNAVYLPMRKEVYQQVSSRIMNLLREYSEKIEIASIDEAYLDISDKVRDYREAYNLGLEIKNKILEKEKITVTVGISKNKVFAKIAADMAKPNGIKVIDDEEVKRLIRELDIADVPGIGNITAEKLKKLGINKLCDTLSIEFDKLKGMIGEAKAKYLISLARDEYNEPIRTRVRKSIGRIVTMKRNSRNLEEIKPYLFRAIEESYYKLDKRIPKAIHVVAVTEDLDIVSRGRTFPHGISKETAYSESVKLLQKILEEDERKIRRIGVRFSKF

SEQ ID NO: 273 - protein, 340 aa, Artificial
  Synthetic
MIVLFVDFDYFYAQVEEVLNPSLKGKPVVVCVFSGRFEDSGAVATANYEARKFGVKAGIPIVEAKKILPNAVYLPGRKEVYQQVSSRIMNLLREYSEKIEIASIDEAYLDISDKVRDYREAYNLGLEIKNKILEKEKITVTVGISKNKVFAKIAADMAKPNGIKVIDDEEVKRLIRELDIADVPGIGNITAEKLKKLGINKLCDTLSIEFDKLKGMIGEAKAKYLISLARDEYNEPIRTRVRKSIGRIVTMKRNSRNLEEIKPYLFRAIEESYYKLDKRIPKAIHVVAVTEDLDIVSRGRTFPHGISKETAYSESVKLLQKILEEDERKIRRIGVRFSKF

SEQ ID NO: 274 - protein, 340 aa, Artificial
  Synthetic
MIVLFVDFDYFYAQVEEVLNPSLKGKPVVVCVFSGRFEDSGAVATANYEARKFGVKAGIPIVEAKKILPNAVYLPARKEVYQQVSSRIMNLLREYSEKIEIASIDEAYLDISDKVRDYREAYNLGLEIKNKILEKEKITVTVGISKNKVFAKIAADMAKPNGIKVIDDEEVKRLIRELDIADVPGIGNITAEKLKKLGINKLCDTLSIEFDKLKGMIGEAKAKYLISLARDEYNEPIRTRVRKSIGRIVTMKRNSRNLEEIKPYLFRAIEESYYKLDKRIPKAIHVVAVTEDLDIVSRGRTFPHGISKETAYSESVKLLQKILEEDERKIRRIGVRFSKF

SEQ ID NO: 275 - protein, 340 aa, Artificial
  Synthetic
MIVLFVDFDYFYAQVEEVLNPSLKGKPVVVCVFSGRFEDSGAVATANYEARKFGVKAGIPIVEAKKCLPNAVYLPMRKEVYQQVSSRIMNLLREYSEKIEIASIDEAYLDISDKVRDYREAYNLGLEIKNKILEKEKITVTVGISKNKVFAKIAADMAKPNGIKVIDDEEVKRLIRELDIADVPGIGNITAEKLKKLGINKLCDTLSIEFDKLKGMIGEAKAKYLISLARDEYNEPIRTRVRKSIGRIVTMKRNSRNLEEIKPYLFRAIEESYYKLDKRIPKAIHVVAVTEDLDIVSRGRTFPHGISKETAYSESVKLLQKILEEDERKIRRIGVRFSKF

SEQ ID NO: 276 - protein, 340 aa, Artificial
  Synthetic
MIVLFVDFDYFYAQVEEVLNPSLKGKPVVVCVFSGRFEDSGAVATANYEARKFGVKAGIPIVEAKKILPNAVYLPMRKEVYQQVSGRIMNLLREYSEKIEIASIDEAYLDISDKVRDYREAYNLGLEIKNKILEKEKITVTVGISKNKVFAKIAADMAKPNGIKVIDDEEVKRLIRELDIADVPGIGNITAEKLKKLGINKLCDTLSIEFDKLKGMIGEAKAKYLISLARDEYNEPIRTRVRKSIGRIVTMKRNSRNLEEIKPYLFRAIEESYYKLDKRIPKAIHVVAVTEDLDIVSRGRTFPHGISKETAYSESVKLLQKILEEDERKIRRIGVRFSKF

SEQ ID NO: 277 - protein, 340 aa, Artificial
  Synthetic
MIVLFVDFDYFYAQVEEVLNPSLKGKPVVVCVFSGRFEDSGAVATANYEARKFGVKAGIPIVEAKKILPNAVYLPMRKEVYQQVSSRIMNLLREYGEKIEIASIDEAYLDISDKVRDYREAYNLGLEIKNKILEKEKITVTVGISKNKVFAKIAADMAKPNGIKVIDDEEVKRLIRELDIADVPGIGNITAEKLKKLGINKLCDTLSIEFDKLKGMIGEAKAKYLISLARDEYNEPIRTRVRKSIGRIVTMKRNSRNLEEIKPYLFRAIEESYYKLDKRIPKAIHVVAVTEDLDIVSRGRTFPHGISKETAYSESVKLLQKILEEDERKIRRIGVRFSKF

SEQ ID NO: 278 - protein, 340 aa, Artificial; identical to SEQ ID NO: 264
  Synthetic

SEQ ID NO: 279 - protein, 340 aa, Artificial; identical to SEQ ID NO: 272
  Synthetic

SEQ ID NO: 280 - protein, 340 aa, Artificial; identical to SEQ ID NO: 256
  Synthetic

SEQ ID NO: 281 - protein, 337 aa, Artificial
  Synthetic
MIVLFVDFDYFYAQVEEVLNPSLKGKPVVVCVFSGRFEDSGAVATANYEARKFGVKAGIPIVEAKKILPNAVYLPMRKEVYQQVSSRIMNLLREYSEKIEIASIDEAYLDISDKVRDYREAYNLGLEIKNKILEKEKITVTVGISKNKVFAKIAADMAKPNGIKVIDDEEVKRLIRELDIADVPGIGNITAEKLKKLGINKLVDTLSIEFDKLKGMIGEAKAKYLISLARDEYNEPIRTRVRKSIGRIVTMKRNSRNLEEIKPYLFRAIEESYYKLDKRIPKAIHVVAVTEDLDIVSRGRTFPHGISKETAYSESVKLLQKILEEDERKIRRIGVRF

SEQ ID NO: 282 - protein, 337 aa, Artificial
  Synthetic
MIVLFVDFDYFYAQVEEVLNPSLKGKPVVVCVFSGRFEDSGAVATANYEARKFGVKAGIPIVEAKKILPNAVYLPMRKEVYQQVSSRIMNLLREYSEKIEIASIDEAYLDISDKVRDYREAYNLGLEIKNKILEKEKITVTVGISKNKVFAKIACDMAKPNGIKVIDDEEVKRLIRELDIADVPGIGNITAEKLKKLGINKLVDTLSIEFDKLKGMIGEAKAKYLISLARDEYNEPIRTRVRKSIGRIVTMKRNSRNLEEIKPYLFRAIEESYYKLDKRIPKAIHVVAVTEDLDIVSRGRTFPHGISKETAYSESVKLLQKILEEDERKIRRIGVRF

SEQ ID NO: 283 - protein, 337 aa, Artificial
  Synthetic
MIVLFVDFDYFYAQVEEVLNPSLKGKPVVVCVFSGRFEDSGAVATANYEARKFGVKAGIPIVEAKKILPNAVYLPMRKEVYQQVSSRIMNLLREYSEKIEIASIDEAYLDISDKVRDYREAYNLGLEIKNKILEKEKITVTVGISKNKVFAKIAADMAKPNGIKVIDDEEVKRLIRELDIADVPGIGNITAEKLKKLGINKLCDTLSIEFDKLKGMIGEAKAKYLISLARDEYNEPIRTRVRKSIGRIVTMKRNSRNLEEIKPYLFRAIEESYYKLDKRIPKAIHVVAVTEDLDIVSRGRTFPHGISKETAYSESVKLLQKILEEDERKIRRIGVRF

SEQ ID NO: 284 - protein, 337 aa, Artificial
  Synthetic
MIVLFVDFDYFYAQVEEVLNPSLKGKPVVVCVFSGRFEDSGAVATANYEARKFGVKAGIPIVEAKKILPNAVYLPMRKEVYQQVSSRIMNLLREYSEKIEIASIDEAYLDISDKVRDYREAYNLGLEIKNKILEKEKITVTVGISKNKVFAKIACDMAKPNGIKVIDDEEVKRLIRELDIADVPGIGNITAEKLKKLGINKLCDTLSIEFDKLKGMIGEAKAKYLISLARDEYNEPIRTRVRKSIGRIVTMKRNSRNLEEIKPYLFRAIEESYYKLDKRIPKAIHVVAVTEDLDIVSRGRTFPHGISKETAYSESVKLLQKILEEDERKIRRIGVRF

SEQ ID NO: 285 - protein, 337 aa, Artificial
  Synthetic
MIVLFVDFDYFYAQVEEVLNPSLKGKPVVVSVFSGRFEDSGAVATANYEARKFGVKAGIPIVEAKKILPNAVYLPMRKEVYQQVSSRIMNLLREYSEKIEIASIDEAYLDISDKVRDYREAYNLGLEIKNKILEKEKITVTVGISKNKVFAKIAADMAKPNGIKVIDDEEVKRLIRELDIADVPGIGNITAEKLKKLGINKLVDTLSIEFDKLKGMIGEAKAKYLISLARDEYNEPIRTRVRKSIGRIVTMKRNSRNLEEIKPYLFRAIEESYYKLDKRIPKAIHVVAVTEDLDIVSRGRTFPHGISKETAYSESVKLLQKILEEDERKIRRIGVRF

SEQ ID NO: 286 - protein, 337 aa, Artificial
  Synthetic
MIVLFVDFDYFYAQVEEVLNPSLKGKPVVVCVFSGRFEDSGAVATANYEARKFGVKAGIPIVEAKKILPNAVYLPMRKEVYQQVCSRIMNLLREYSEKIEIASIDEAYLDISDKVRDYREAYNLGLEIKNKILEKEKITVTVGISKNKVFAKIAADMAKPNGIKVIDDEEVKRLIRELDIADVPGIGNITAEKLKKLGINKLVDTLSIEFDKLKGMIGEAKAKYLISLARDEYNEPIRTRVRKSIGRIVTMKRNSRNLEEIKPYLFRAIEESYYKLDKRIPKAIHVVAVTEDLDIVSRGRTFPHGISKETAYSESVKLLQKILEEDERKIRRIGVRF

SEQ ID NO: 287 - protein, 337 aa, Artificial
  Synthetic
MIVLFVDFDYFYAQVEEVLNPSLKGKPVVVCVFSGRFEDSGAVATANYEARKFGVKAGIPIVEAKKILPNAVYLPMRKEVYQQVSCRIMNLLREYSEKIEIASIDEAYLDISDKVRDYREAYNLGLEIKNKILEKEKITVTVGISKNKVFAKIAADMAKPNGIKVIDDEEVKRLIRELDIADVPGIGNITAEKLKKLGINKLVDTLSIEFDKLKGMIGEAKAKYLISLARDEYNEPIRTRVRKSIGRIVTMKRNSRNLEEIKPYLFRAIEESYYKLDKRIPKAIHVVAVTEDLDIVSRGRTFPHGISKETAYSESVKLLQKILEEDERKIRRIGVRF

SEQ ID NO: 288 - protein, 337 aa, Artificial
  Synthetic
MIVLFVDFDYFYAQVEEVLNPSLKGKPVVVCVFSGRFEDSGAVATANYEARKFGVKAGIPIVEAKKILPNAVYLPMRKEVYQQVSSRIMNLLREYCEKIEIASIDEAYLDISDKVRDYREAYNLGLEIKNKILEKEKITVTVGISKNKVFAKIAADMAKPNGIKVIDDEEVKRLIRELDIADVPGIGNITAEKLKKLGINKLVDTLSIEFDKLKGMIGEAKAKYLISLARDEYNEPIRTRVRKSIGRIVTMKRNSRNLEEIKPYLFRAIEESYYKLDKRIPKAIHVVAVTEDLDIVSRGRTFPHGISKETAYSESVKLLQKILEEDERKIRRIGVRF

SEQ ID NO: 289 - protein, 337 aa, Artificial
  Synthetic
MIVLFVDFDYFYAQVEEVLNPSLKGKPVVVCVFSGRFEDSGAVATANYEARKFGVKAGIPIVEAKKILPNCVYLPMRKEVYQQVSSRIMNLLREYSEKIEIASIDEAYLDISDKVRDYREAYNLGLEIKNKILEKEKITVTVGISKNKVFAKIAADMAKPNGIKVIDDEEVKRLIRELDIADVPGIGNITAEKLKKLGINKLVDTLSIEFDKLKGMIGEAKAKYLISLARDEYNEPIRTRVRKSIGRIVTMKRNSRNLEEIKPYLFRAIEESYYKLDKRIPKAIHVVAVTEDLDIVSRGRTFPHGISKETAYSESVKLLQKILEEDERKIRRIGVRF

SEQ ID NO: 290 - protein, 337 aa, Artificial
  Synthetic
MIVLFVDFDYFYAQVEEVLNPSLKGKPVVVCVFSGRFEDSGAVATANYEARKFGVKAGIPIVEAKKILPNAVYLPGRKEVYQQVSSRIMNLLREYSEKIEIASIDEAYLDISDKVRDYREAYNLGLEIKNKILEKEKITVTVGISKNKVFAKIAADMAKPNGIKVIDDEEVKRLIRELDIADVPGIGNITAEKLKKLGINKLVDTLSIEFDKLKGMIGEAKAKYLISLARDEYNEPIRTRVRKSIGRIVTMKRNSRNLEEIKPYLFRAIEESYYKLDKRIPKAIHVVAVTEDLDIVSRGRTFPHGISKETAYSESVKLLQKILEEDERKIRRIGVRF

SEQ ID NO: 291 - protein, 337 aa, Artificial
  Synthetic
MIVLFVDFDYFYAQVEEVLNPSLKGKPVVVCVFSGRFEDSGAVATANYEARKFGVKAGIPIVEAKKILPNAVYLPARKEVYQQVSSRIMNLLREYSEKIEIASIDEAYLDISDKVRDYREAYNLGLEIKNKILEKEKITVTVGISKNKVFAKIAADMAKPNGIKVIDDEEVKRLIRELDIADVPGIGNITAEKLKKLGINKLVDTLSIEFDKLKGMIGEAKAKYLISLARDEYNEPIRTRVRKSIGRIVTMKRNSRNLEEIKPYLFRAIEESYYKLDKRIPKAIHVVAVTEDLDIVSRGRTFPHGISKETAYSESVKLLQKILEEDERKIRRIGVRF

SEQ ID NO: 292 - protein, 337 aa, Artificial
  Synthetic
MIVLFVDFDYFYAQVEEVLNPSLKGKPVVVCVFSGRFEDSGAVATANYEARKFGVKAGIPIVEAKKCLPNAVYLPMRKEVYQQVSSRIMNLLREYSEKIEIASIDEAYLDISDKVRDYREAYNLGLEIKNKILEKEKITVTVGISKNKVFAKIAADMAKPNGIKVIDDEEVKRLIRELDIADVPGIGNITAEKLKKLGINKLVDTLSIEFDKLKGMIGEAKAKYLISLARDEYNEPIRTRVRKSIGRIVTMKRNSRNLEEIKPYLFRAIEESYYKLDKRIPKAIHVVAVTEDLDIVSRGRTFPHGISKETAYSESVKLLQKILEEDERKIRRIGVRF

SEQ ID NO: 293 - protein, 337 aa, Artificial
  Synthetic
MIVLFVDFDYFYAQVEEVLNPSLKGKPVVVCVFSGRFEDSGAVATANYEARKFGVKAGIPIVEAKKILPNAVYLPMRKEVYQQVSGRIMNLLREYSEKIEIASIDEAYLDISDKVRDYREAYNLGLEIKNKILEKEKITVTVGISKNKVFAKIAADMAKPNGIKVIDDEEVKRLIRELDIADVPGIGNITAEKLKKLGINKLVDTLSIEFDKLKGMIGEAKAKYLISLARDEYNEPIRTRVRKSIGRIVTMKRNSRNLEEIKPYLFRAIEESYYKLDKRIPKAIHVVAVTEDLDIVSRGRTFPHGISKETAYSESVKLLQKILEEDERKIRRIGVRF

SEQ ID NO: 294 - protein, 337 aa, Artificial
  Synthetic
MIVLFVDFDYFYAQVEEVLNPSLKGKPVVVCVFSGRFEDSGAVATANYEARKFGVKAGIPIVEAKKILPNCVYLPMRKEVYQQVSSRIMNLLREYSEKIEIASIDEAYLDISDKVRDYREAYNLGLEIKNKILEKEKITVTVGISKNKVFAKIACDMAKPNGIKVIDDEEVKRLIRELDIADVPGIGNITAEKLKKLGINKLCDTLSIEFDKLKGMIGEAKAKYLISLARDEYNEPIRTRVRKSIGRIVTMKRNSRNLEEIKPYLFRAIEESYYKLDKRIPKAIHVVAVTEDLDIVSRGRTFPHGISKETAYSESVKLLQKILEEDERKIRRIGVRF

SEQ ID NO: 295 - protein, 337 aa, Artificial
  Synthetic
MIVLFVDFDYFYAQVEEVLNPSLKGKPVVVCVFSGRFEDSGAVATANYEARKFGVKAGIPIVEAKKILPNAVYLPMRKEVYQQVSCRIMNLLREYSEKIEIASIDEAYLDISDKVRDYREAYNLGLEIKNKILEKEKITVTVGISKNKVFAKIACDMAKPNGIKVIDDEEVKRLIRELDIADVPGIGNITAEKLKKLGINKLCDTLSIEFDKLKGMIGEAKAKYLISLARDEYNEPIRTRVRKSIGRIVTMKRNSRNLEEIKPYLFRAIEESYYKLDKRIPKAIHVVAVTEDLDIVSRGRTFPHGISKETAYSESVKLLQKILEEDERKIRRIGVRF

SEQ ID NO: 296 - protein, 337 aa, Artificial
  Synthetic
MIVLFVDFDYFYAQVEEVLNPSLKGKPVVVSVFSGRFEDSGAVATANYEARKFGVKAGIPIVEAKKILPNAVYLPMRKEVYQQVSSRIMNLLREYSEKIEIASIDEAYLDISDKVRDYREAYNLGLEIKNKILEKEKITVTVGISKNKVFAKIACDMAKPNGIKVIDDEEVKRLIRELDIADVPGIGNITAEKLKKLGINKLCDTLSIEFDKLKGMIGEAKAKYLISLARDEYNEPIRTRVRKSIGRIVTMKRNSRNLEEIKPYLFRAIEESYYKLDKRIPKAIHVVAVTEDLDIVSRGRTFPHGISKETAYSESVKLLQKILEEDERKIRRIGVRF

SEQ ID NO: 297 - protein, 337 aa, Artificial
  Synthetic
MIVLFVDFDYFYAQVEEVLNPSLKGKPVVVCVFSGRFEDSGAVATANYEARKFGVKAGIPIVEAKKILPNAVYLPGRKEVYQQVSSRIMNLLREYSEKIEIASIDEAYLDISDKVRDYREAYNLGLEIKNKILEKEKITVTVGISKNKVFAKIACDMAKPNGIKVIDDEEVKRLIRELDIADVPGIGNITAEKLKKLGINKLCDTLSIEFDKLKGMIGEAKAKYLISLARDEYNEPIRTRVRKSIGRIVTMKRNSRNLEEIKPYLFRAIEESYYKLDKRIPKAIHVVAVTEDLDIVSRGRTFPHGISKETAYSESVKLLQKILEEDERKIRRIGVRF

SEQ ID NO: 298 - protein, 337 aa, Artificial
  Synthetic
MIVLFVDFDYFYAQVEEVLNPSLKGKPVVVCVFSGRFEDSGAVATANYEARKFGVKAGIPIVEAKKILPNAVYLPARKEVYQQVSSRIMNLLREYSEKIEIASIDEAYLDISDKVRDYREAYNLGLEIKNKILEKEKITVTVGISKNKVFAKIACDMAKPNGIKVIDDEEVKRLIRELDIADVPGIGNITAEKLKKLGINKLCDTLSIEFDKLKGMIGEAKAKYLISLARDEYNEPIRTRVRKSIGRIVTMKRNSRNLEEIKPYLFRAIEESYYKLDKRIPKAIHVVAVTEDLDIVSRGRTFPHGISKETAYSESVKLLQKILEEDERKIRRIGVRF

SEQ ID NO: 299 - protein, 337 aa, Artificial
  Synthetic
MIVLFVDFDYFYAQVEEVLNPSLKGKPVVVCVFSGRFEDSGAVATANYEARKFGVKAGIPIVEAKKCLPNAVYLPMRKEVYQQVSSRIMNLLREYSEKIEIASIDEAYLDISDKVRDYREAYNLGLEIKNKILEKEKITVTVGISKNKVFAKIACDMAKPNGIKVIDDEEVKRLIRELDIADVPGIGNITAEKLKKLGINKLCDTLSIEFDKLKGMIGEAKAKYLISLARDEYNEPIRTRVRKSIGRIVTMKRNSRNLEEIKPYLFRAIEESYYKLDKRIPKAIHVVAVTEDLDIVSRGRTFPHGISKETAYSESVKLLQKILEEDERKIRRIGVRF

SEQ ID NO: 300 - protein, 337 aa, Artificial
  Synthetic
MIVLFVDFDYFYAQVEEVLNPSLKGKPVVVCVFSGRFEDSGAVATANYEARKFGVKAGIPIVEAKKILPNAVYLPMRKEVYQQVSGRIMNLLREYSEKIEIASIDEAYLDISDKVRDYREAYNLGLEIKNKILEKEKITVTVGISKNKVFAKIACDMAKPNGIKVIDDEEVKRLIRELDIADVPGIGNITAEKLKKLGINKLCDTLSIEFDKLKGMIGEAKAKYLISLARDEYNEPIRTRVRKSIGRIVTMKRNSRNLEEIKPYLFRAIEESYYKLDKRIPKAIHVVAVTEDLDIVSRGRTFPHGISKETAYSESVKLLQKILEEDERKIRRIGVRF

SEQ ID NO: 301 - protein, 337 aa, Artificial
  Synthetic
MIVLFVDFDYFYAQVEEVLNPSLKGKPVVVCVFSGRFEDSGAVATANYEARKFGVKAGIPIVEAKKILPNAVYLPMRKEVYQQVSSRIMNLLREYGEKIEIASIDEAYLDISDKVRDYREAYNLGLEIKNKILEKEKITVTVGISKNKVFAKIACDMAKPNGIKVIDDEEVKRLIRELDIADVPGIGNITAEKLKKLGINKLCDTLSIEFDKLKGMIGEAKAKYLISLARDEYNEPIRTRVRKSIGRIVTMKRNSRNLEEIKPYLFRAIEESYYKLDKRIPKAIHVVAVTEDLDIVSRGRTFPHGISKETAYSESVKLLQKILEEDERKIRRIGVRF

SEQ ID NO: 302 - protein, 337 aa, Artificial
  Synthetic
MIVLFVDFDYFYAQVEEVLNPSLKGKPVVVCVFSGRFEDSGAVATANYEARKFGVKAGIPIVEAKKILPNCVYLPMRKEVYQQVSSRIMNLLREYSEKIEIASIDEAYLDISDKVRDYREAYNLGLEIKNKILEKEKITVTVGISKNKVFAKIACDMAKPNGIKVIDDEEVKRLIRELDIADVPGIGNITAEKLKKLGINKLVDTLSIEFDKLKGMIGEAKAKYLISLARDEYNEPIRTRVRKSIGRIVTMKRNSRNLEEIKPYLFRAIEESYYKLDKRIPKAIHVVAVTEDLDIVSRGRTFPHGISKETAYSESVKLLQKILEEDERKIRRIGVRF

SEQ ID NO: 303 - protein, 337 aa, Artificial
  Synthetic
MIVLFVDFDYFYAQVEEVLNPSLKGKPVVVCVFSGRFEDSGAVATANYEARKFGVKAGIPIVEAKKILPNAVYLPMRKEVYQQVSCRIMNLLREYSEKIEIASIDEAYLDISDKVRDYREAYNLGLEIKNKILEKEKITVTVGISKNKVFAKIACDMAKPNGIKVIDDEEVKRLIRELDIADVPGIGNITAEKLKKLGINKLVDTLSIEFDKLKGMIGEAKAKYLISLARDEYNEPIRTRVRKSIGRIVTMKRNSRNLEEIKPYLFRAIEESYYKLDKRIPKAIHVVAVTEDLDIVSRGRTFPHGISKETAYSESVKLLQKILEEDERKIRRIGVRF

SEQ ID NO: 304 - protein, 337 aa, Artificial
  Synthetic
MIVLFVDFDYFYAQVEEVLNPSLKGKPVVVSVFSGRFEDSGAVATANYEARKFGVKAGIPIVEAKKILPNAVYLPMRKEVYQQVSSRIMNLLREYSEKIEIASIDEAYLDISDKVRDYREAYNLGLEIKNKILEKEKITVTVGISKNKVFAKIACDMAKPNGIKVIDDEEVKRLIRELDIADVPGIGNITAEKLKKLGINKLVDTLSIEFDKLKGMIGEAKAKYLISLARDEYNEPIRTRVRKSIGRIVTMKRNSRNLEEIKPYLFRAIEESYYKLDKRIPKAIHVVAVTEDLDIVSRGRTFPHGISKETAYSESVKLLQKILEEDERKIRRIGVRF

SEQ ID NO: 305 - protein, 337 aa, Artificial
  Synthetic
MIVLFVDFDYFYAQVEEVLNPSLKGKPVVVCVFSGRFEDSGAVATANYEARKFGVKAGIPIVEAKKILPNAVYLPGRKEVYQQVSSRIMNLLREYSEKIEIASIDEAYLDISDKVRDYREAYNLGLEIKNKILEKEKITVTVGISKNKVFAKIACDMAKPNGIKVIDDEEVKRLIRELDIADVPGIGNITAEKLKKLGINKLVDTLSIEFDKLKGMIGEAKAKYLISLARDEYNEPIRTRVRKSIGRIVTMKRNSRNLEEIKPYLFRAIEESYYKLDKRIPKAIHVVAVTEDLDIVSRGRTFPHGISKETAYSESVKLLQKILEEDERKIRRIGVRF

SEQ ID NO: 306 - protein, 337 aa, Artificial
  Synthetic
MIVLFVDFDYFYAQVEEVLNPSLKGKPVVVCVFSGRFEDSGAVATANYEARKFGVKAGIPIVEAKKILPNAVYLPARKEVYQQVSSRIMNLLREYSEKIEIASIDEAYLDISDKVRDYREAYNLGLEIKNKILEKEKITVTVGISKNKVFAKIACDMAKPNGIKVIDDEEVKRLIRELDIADVPGIGNITAEKLKKLGINKLVDTLSIEFDKLKGMIGEAKAKYLISLARDEYNEPIRTRVRKSIGRIVTMKRNSRNLEEIKPYLFRAIEESYYKLDKRIPKAIHVVAVTEDLDIVSRGRTFPHGISKETAYSESVKLLQKILEEDERKIRRIGVRF

SEQ ID NO: 307 - protein, 337 aa, Artificial
  Synthetic
MIVLFVDFDYFYAQVEEVLNPSLKGKPVVVCVFSGRFEDSGAVATANYEARKFGVKAGIPIVEAKKCLPNAVYLPMRKEVYQQVSSRIMNLLREYSEKIEIASIDEAYLDISDKVRDYREAYNLGLEIKNKILEKEKITVTVGISKNKVFAKIACDMAKPNGIKVIDDEEVKRLIRELDIADVPGIGNITAEKLKKLGINKLVDTLSIEFDKLKGMIGEAKAKYLISLARDEYNEPIRTRVRKSIGRIVTMKRNSRNLEEIKPYLFRAIEESYYKLDKRIPKAIHVVAVTEDLDIVSRGRTFPHGISKETAYSESVKLLQKILEEDERKIRRIGVRF

SEQ ID NO: 308 - protein, 337 aa, Artificial
  Synthetic
MIVLFVDFDYFYAQVEEVLNPSLKGKPVVVCVFSGRFEDSGAVATANYEARKFGVKAGIPIVEAKKILPNAVYLPMRKEVYQQVSGRIMNLLREYSEKIEIASIDEAYLDISDKVRDYREAYNLGLEIKNKILEKEKITVTVGISKNKVFAKIACDMAKPNGIKVIDDEEVKRLIRELDIADVPGIGNITAEKLKKLGINKLVDTLSIEFDKLKGMIGEAKAKYLISLARDEYNEPIRTRVRKSIGRIVTMKRNSRNLEEIKPYLFRAIEESYYKLDKRIPKAIHVVAVTEDLDIVSRGRTFPHGISKETAYSESVKLLQKILEEDERKIRRIGVRF

SEQ ID NO: 309 - protein, 337 aa, Artificial
  Synthetic
MIVLFVDFDYFYAQVEEVLNPSLKGKPVVVCVFSGRFEDSGAVATANYEARKFGVKAGIPIVEAKKILPNAVYLPMRKEVYQQVSSRIMNLLREYGEKIEIASIDEAYLDISDKVRDYREAYNLGLEIKNKILEKEKITVTVGISKNKVFAKIACDMAKPNGIKVIDDEEVKRLIRELDIADVPGIGNITAEKLKKLGINKLVDTLSIEFDKLKGMIGEAKAKYLISLARDEYNEPIRTRVRKSIGRIVTMKRNSRNLEEIKPYLFRAIEESYYKLDKRIPKAIHVVAVTEDLDIVSRGRTFPHGISKETAYSESVKLLQKILEEDERKIRRIGVRF

SEQ ID NO: 310 - protein, 337 aa, Artificial
  Synthetic
MIVLFVDFDYFYAQVEEVLNPSLKGKPVVVCVFSGRFEDSGAVATANYEARKFGVKAGIPIVEAKKILPNCVYLPMRKEVYQQVSSRIMNLLREYSEKIEIASIDEAYLDISDKVRDYREAYNLGLEIKNKILEKEKITVTVGISKNKVFAKIAADMAKPNGIKVIDDEEVKRLIRELDIADVPGIGNITAEKLKKLGINKLCDTLSIEFDKLKGMIGEAKAKYLISLARDEYNEPIRTRVRKSIGRIVTMKRNSRNLEEIKPYLFRAIEESYYKLDKRIPKAIHVVAVTEDLDIVSRGRTFPHGISKETAYSESVKLLQKILEEDERKIRRIGVRF

SEQ ID NO: 311 - protein, 337 aa, Artificial
  Synthetic
MIVLFVDFDYFYAQVEEVLNPSLKGKPVVVCVFSGRFEDSGAVATANYEARKFGVKAGIPIVEAKKILPNAVYLPMRKEVYQQVSCRIMNLLREYSEKIEIASIDEAYLDISDKVRDYREAYNLGLEIKNKILEKEKITVTVGISKNKVFAKIAADMAKPNGIKVIDDEEVKRLIRELDIADVPGIGNITAEKLKKLGINKLCDTLSIEFDKLKGMIGEAKAKYLISLARDEYNEPIRTRVRKSIGRIVTMKRNSRNLEEIKPYLFRAIEESYYKLDKRIPKAIHVVAVTEDLDIVSRGRTFPHGISKETAYSESVKLLQKILEEDERKIRRIGVRF

SEQ ID NO: 312 - protein, 337 aa, Artificial
  Synthetic
MIVLFVDFDYFYAQVEEVLNPSLKGKPVVVSVFSGRFEDSGAVATANYEARKFGVKAGIPIVEAKKILPNAVYLPMRKEVYQQVSSRIMNLLREYSEKIEIASIDEAYLDISDKVRDYREAYNLGLEIKNKILEKEKITVTVGISKNKVFAKIAADMAKPNGIKVIDDEEVKRLIRELDIADVPGIGNITAEKLKKLGINKLCDTLSIEFDKLKGMIGEAKAKYLISLARDEYNEPIRTRVRKSIGRIVTMKRNSRNLEEIKPYLFRAIEESYYKLDKRIPKAIHVVAVTEDLDIVSRGRTFPHGISKETAYSESVKLLQKILEEDERKIRRIGVRF

SEQ ID NO: 313 - protein, 337 aa, Artificial
  Synthetic
MIVLFVDFDYFYAQVEEVLNPSLKGKPVVVCVFSGRFEDSGAVATANYEARKFGVKAGIPIVEAKKILPNAVYLPGRKEVYQQVSSRIMNLLREYSEKIEIASIDEAYLDISDKVRDYREAYNLGLEIKNKILEKEKITVTVGISKNKVFAKIAADMAKPNGIKVIDDEEVKRLIRELDIADVPGIGNITAEKLKKLGINKLCDTLSIEFDKLKGMIGEAKAKYLISLARDEYNEPIRTRVRKSIGRIVTMKRNSRNLEEIKPYLFRAIEESYYKLDKRIPKAIHVVAVTEDLDIVSRGRTFPHGISKETAYSESVKLLQKILEEDERKIRRIGVRF

SEQ ID NO: 314 - protein, 337 aa, Artificial
  Synthetic
MIVLFVDFDYFYAQVEEVLNPSLKGKPVVVCVFSGRFEDSGAVATANYEARKFGVKAGIPIVEAKKILPNAVYLPARKEVYQQVSSRIMNLLREYSEKIEIASIDEAYLDISDKVRDYREAYNLGLEIKNKILEKEKITVTVGISKNKVFAKIAADMAKPNGIKVIDDEEVKRLIRELDIADVPGIGNITAEKLKKLGINKLCDTLSIEFDKLKGMIGEAKAKYLISLARDEYNEPIRTRVRKSIGRIVTMKRNSRNLEEIKPYLFRAIEESYYKLDKRIPKAIHVVAVTEDLDIVSRGRTFPHGISKETAYSESVKLLQKILEEDERKIRRIGVRF

SEQ ID NO: 315 - protein, 337 aa, Artificial
  Synthetic
MIVLFVDFDYFYAQVEEVLNPSLKGKPVVVCVFSGRFEDSGAVATANYEARKFGVKAGIPIVEAKKCLPNAVYLPMRKEVYQQVSSRIMNLLREYSEKIEIASIDEAYLDISDKVRDYREAYNLGLEIKNKILEKEKITVTVGISKNKVFAKIAADMAKPNGIKVIDDEEVKRLIRELDIADVPGIGNITAEKLKKLGINKLCDTLSIEFDKLKGMIGEAKAKYLISLARDEYNEPIRTRVRKSIGRIVTMKRNSRNLEEIKPYLFRAIEESYYKLDKRIPKAIHVVAVTEDLDIVSRGRTFPHGISKETAYSESVKLLQKILEEDERKIRRIGVRF

SEQ ID NO: 316 - protein, 337 aa, Artificial
  Synthetic
MIVLFVDFDYFYAQVEEVLNPSLKGKPVVVCVFSGRFEDSGAVATANYEARKFGVKAGIPIVEAKKILPNAVYLPMRKEVYQQVSGRIMNLLREYSEKIEIASIDEAYLDISDKVRDYREAYNLGLEIKNKILEKEKITVTVGISKNKVFAKIAADMAKPNGIKVIDDEEVKRLIRELDIADVPGIGNITAEKLKKLGINKLCDTLSIEFDKLKGMIGEAKAKYLISLARDEYNEPIRTRVRKSIGRIVTMKRNSRNLEEIKPYLFRAIEESYYKLDKRIPKAIHVVAVTEDLDIVSRGRTFPHGISKETAYSESVKLLQKILEEDERKIRRIGVRF

SEQ ID NO: 317 - protein, 337 aa, Artificial
  Synthetic
MIVLFVDFDYFYAQVEEVLNPSLKGKPVVVCVFSGRFEDSGAVATANYEARKFGVKAGIPIVEAKKILPNAVYLPMRKEVYQQVSSRIMNLLREYGEKIEIASIDEAYLDISDKVRDYREAYNLGLEIKNKILEKEKITVTVGISKNKVFAKIAADMAKPNGIKVIDDEEVKRLIRELDIADVPGIGNITAEKLKKLGINKLCDTLSIEFDKLKGMIGEAKAKYLISLARDEYNEPIRTRVRKSIGRIVTMKRNSRNLEEIKPYLFRAIEESYYKLDKRIPKAIHVVAVTEDLDIVSRGRTFPHGISKETAYSESVKLLQKILEEDERKIRRIGVRF

SEQ ID NO: 318 - protein, 337 aa, Artificial; identical to SEQ ID NO: 304
  Synthetic

SEQ ID NO: 319 - protein, 337 aa, Artificial; identical to SEQ ID NO: 312
  Synthetic

SEQ ID NO: 320 - protein, 337 aa, Artificial; identical to SEQ ID NO: 296
  Synthetic

SEQ ID NO: 321 - protein, 352 aa, Artificial
  Synthetic
MIVLFVDFDYFYAQVEEVLNPSLKGKPVVVCVFSGRFEDSGAVATANYEARKFGVKAGIPIVEAKKILPNAVYLPMRKEVYQQVCSRIMNLLREYSEKIEIASIDEAYLDISDKVRDYREAYNLGLEIKNKILEKEKITVTVGISKNKVFAKIACDMAKPNGIKVIDDEEVKRLIRELDIADVPGIGNITAEKLKKLGINKLVDTLSIEFDKLKGMIGEAKAKYLISLARDEYNEPIRTRVRKSIGRIVTMKRNSRNLEEIKPYLFRAIEESYYKLDKRIPKAIHVVAVTEDLDIVSRGRTFPHGISKETAYSESVKLLQKILEEDERKIRRIGVRFSKFIEAIGLDKFFDT

SEQ ID NO: 322 - protein, 352 aa, Artificial
  Synthetic
MIVLFVDFDYFYAQVEEVLNPSLKGKPVVVCVFSGRFEDSGAVATANYEARKFGVKAGIPIVEAKKILPNAVYLPMRKEVYQQVCSRIMNLLREYSEKIEIASIDEAYLDISDKVRDYREAYNLGLEIKNKILEKEKITVTVGISKNKVFAKIAADMAKPNGIKVIDDEEVKRLIRELDIADVPGIGNITAEKLKKLGINKLCDTLSIEFDKLKGMIGEAKAKYLISLARDEYNEPIRTRVRKSIGRIVTMKRNSRNLEEIKPYLFRAIEESYYKLDKRIPKAIHVVAVTEDLDIVSRGRTFPHGISKETAYSESVKLLQKILEEDERKIRRIGVRFSKFIEAIGLDKFFDT

SEQ ID NO: 323 - protein, 352 aa, Artificial
  Synthetic
MIVLFVDFDYFYAQVEEVLNPSLKGKPVVVCVFSGRFEDSGAVATANYEARKFGVKAGIPIVEAKKILPNAVYLPMRKEVYQQVCSRIMNLLREYSEKIEIASIDEAYLDISDKVRDYREAYNLGLEIKNKILEKEKITVTVGISKNKVFAKIACDMAKPNGIKVIDDEEVKRLIRELDIADVPGIGNITAEKLKKLGINKLCDTLSIEFDKLKGMIGEAKAKYLISLARDEYNEPIRTRVRKSIGRIVTMKRNSRNLEEIKPYLFRAIEESYYKLDKRIPKAIHVVAVTEDLDIVSRGRTFPHGISKETAYSESVKLLQKILEEDERKIRRIGVRFSKFIEAIGLDKFFDT

SEQ ID NO: 324 - protein, 349 aa, Artificial
  Synthetic
MIVLFVDFDYFYAQVEEVLNPSLKGKPVVVCVFSGRFEDSGAVATANYEARKFGVKAGIPIVEAKKILPNAVYLPMRKEVYQQVCSRIMNLLREYSEKIEIASIDEAYLDISDKVRDYREAYNLGLEIKNKILEKEKITVTVGISKNKVFAKIACDMAKPNGIKVIDDEEVKRLIRELDIADVPGIGNITAEKLKKLGINKLVDTLSIEFDKLKGMIGEAKAKYLISLARDEYNEPIRTRVRKSIGRIVTMKRNSRNLEEIKPYLFRAIEESYYKLDKRIPKAIHVVAVTEDLDIVSRGRTFPHGISKETAYSESVKLLQKILEEDERKIRRIGVRFSKFIEAIGLDKF

SEQ ID NO: 325 - protein, 349 aa, Artificial
  Synthetic
MIVLFVDFDYFYAQVEEVLNPSLKGKPVVVCVFSGRFEDSGAVATANYEARKFGVKAGIPIVEAKKILPNAVYLPMRKEVYQQVCSRIMNLLREYSEKIEIASIDEAYLDISDKVRDYREAYNLGLEIKNKILEKEKITVTVGISKNKVFAKIAADMAKPNGIKVIDDEEVKRLIRELDIADVPGIGNITAEKLKKLGINKLCDTLSIEFDKLKGMIGEAKAKYLISLARDEYNEPIRTRVRKSIGRIVTMKRNSRNLEEIKPYLFRAIEESYYKLDKRIPKAIHVVAVTEDLDIVSRGRTFPHGISKETAYSESVKLLQKILEEDERKIRRIGVRFSKFIEAIGLDKF

SEQ ID NO: 326 - protein, 349 aa, Artificial
  Synthetic
MIVLFVDFDYFYAQVEEVLNPSLKGKPVVVCVFSGRFEDSGAVATANYEARKFGVKAGIPIVEAKKILPNAVYLPMRKEVYQQVCSRIMNLLREYSEKIEIASIDEAYLDISDKVRDYREAYNLGLEIKNKILEKEKITVTVGISKNKVFAKIACDMAKPNGIKVIDDEEVKRLIRELDIADVPGIGNITAEKLKKLGINKLCDTLSIEFDKLKGMIGEAKAKYLISLARDEYNEPIRTRVRKSIGRIVTMKRNSRNLEEIKPYLFRAIEESYYKLDKRIPKAIHVVAVTEDLDIVSRGRTFPHGISKETAYSESVKLLQKILEEDERKIRRIGVRFSKFIEAIGLDKF

SEQ ID NO: 327 - protein, 346 aa, Artificial
  Synthetic
MIVLFVDFDYFYAQVEEVLNPSLKGKPVVVCVFSGRFEDSGAVATANYEARKFGVKAGIPIVEAKKILPNAVYLPMRKEVYQQVCSRIMNLLREYSEKIEIASIDEAYLDISDKVRDYREAYNLGLEIKNKILEKEKITVTVGISKNKVFAKIACDMAKPNGIKVIDDEEVKRLIRELDIADVPGIGNITAEKLKKLGINKLVDTLSIEFDKLKGMIGEAKAKYLISLARDEYNEPIRTRVRKSIGRIVTMKRNSRNLEEIKPYLFRAIEESYYKLDKRIPKAIHVVAVTEDLDIVSRGRTFPHGISKETAYSESVKLLQKILEEDERKIRRIGVRFSKFIEAIGL

SEQ ID NO: 328 - protein, 346 aa, Artificial
  Synthetic
MIVLFVDFDYFYAQVEEVLNPSLKGKPVVVCVFSGRFEDSGAVATANYEARKFGVKAGIPIVEAKKILPNAVYLPMRKEVYQQVCSRIMNLLREYSEKIEIASIDEAYLDISDKVRDYREAYNLGLEIKNKILEKEKITVTVGISKNKVFAKIAADMAKPNGIKVIDDEEVKRLIRELDIADVPGIGNITAEKLKKLGINKLCDTLSIEFDKLKGMIGEAKAKYLISLARDEYNEPIRTRVRKSIGRIVTMKRNSRNLEEIKPYLFRAIEESYYKLDKRIPKAIHVVAVTEDLDIVSRGRTFPHGISKETAYSESVKLLQKILEEDERKIRRIGVRFSKFIEAIGL

SEQ ID NO: 329 - protein, 346 aa, Artificial
  Synthetic
MIVLFVDFDYFYAQVEEVLNPSLKGKPVVVCVFSGRFEDSGAVATANYEARKFGVKAGIPIVEAKKILPNAVYLPMRKEVYQQVCSRIMNLLREYSEKIEIASIDEAYLDISDKVRDYREAYNLGLEIKNKILEKEKITVTVGISKNKVFAKIACDMAKPNGIKVIDDEEVKRLIRELDIADVPGIGNITAEKLKKLGINKLCDTLSIEFDKLKGMIGEAKAKYLISLARDEYNEPIRTRVRKSIGRIVTMKRNSRNLEEIKPYLFRAIEESYYKLDKRIPKAIHVVAVTEDLDIVSRGRTFPHGISKETAYSESVKLLQKILEEDERKIRRIGVRFSKFIEAIGL

SEQ ID NO: 330 - protein, 343 aa, Artificial
  Synthetic
MIVLFVDFDYFYAQVEEVLNPSLKGKPVVVCVFSGRFEDSGAVATANYEARKFGVKAGIPIVEAKKILPNAVYLPMRKEVYQQVCSRIMNLLREYSEKIEIASIDEAYLDISDKVRDYREAYNLGLEIKNKILEKEKITVTVGISKNKVFAKIACDMAKPNGIKVIDDEEVKRLIRELDIADVPGIGNITAEKLKKLGINKLVDTLSIEFDKLKGMIGEAKAKYLISLARDEYNEPIRTRVRKSIGRIVTMKRNSRNLEEIKPYLFRAIEESYYKLDKRIPKAIHVVAVTEDLDIVSRGRTFPHGISKETAYSESVKLLQKILEEDERKIRRIGVRFSKFIEA

SEQ ID NO: 331 - protein, 343 aa, Artificial
  Synthetic
MIVLFVDFDYFYAQVEEVLNPSLKGKPVVVCVFSGRFEDSGAVATANYEARKFGVKAGIPIVEAKKILPNAVYLPMRKEVYQQVCSRIMNLLREYSEKIEIASIDEAYLDISDKVRDYREAYNLGLEIKNKILEKEKITVTVGISKNKVFAKIAADMAKPNGIKVIDDEEVKRLIRELDIADVPGIGNITAEKLKKLGINKLCDTLSIEFDKLKGMIGEAKAKYLISLARDEYNEPIRTRVRKSIGRIVTMKRNSRNLEEIKPYLFRAIEESYYKLDKRIPKAIHVVAVTEDLDIVSRGRTFPHGISKETAYSESVKLLQKILEEDERKIRRIGVRFSKFIEA

SEQ ID NO: 332 - protein, 343 aa, Artificial
  Synthetic
MIVLFVDFDYFYAQVEEVLNPSLKGKPVVVCVFSGRFEDSGAVATANYEARKFGVKAGIPIVEAKKILPNAVYLPMRKEVYQQVCSRIMNLLREYSEKIEIASIDEAYLDISDKVRDYREAYNLGLEIKNKILEKEKITVTVGISKNKVFAKIACDMAKPNGIKVIDDEEVKRLIRELDIADVPGIGNITAEKLKKLGINKLCDTLSIEFDKLKGMIGEAKAKYLISLARDEYNEPIRTRVRKSIGRIVTMKRNSRNLEEIKPYLFRAIEESYYKLDKRIPKAIHVVAVTEDLDIVSRGRTFPHGISKETAYSESVKLLQKILEEDERKIRRIGVRFSKFIEA

SEQ ID NO: 333 - protein, 340 aa, Artificial
  Synthetic
MIVLFVDFDYFYAQVEEVLNPSLKGKPVVVCVFSGRFEDSGAVATANYEARKFGVKAGIPIVEAKKILPNAVYLPMRKEVYQQVCSRIMNLLREYSEKIEIASIDEAYLDISDKVRDYREAYNLGLEIKNKILEKEKITVTVGISKNKVFAKIACDMAKPNGIKVIDDEEVKRLIRELDIADVPGIGNITAEKLKKLGINKLVDTLSIEFDKLKGMIGEAKAKYLISLARDEYNEPIRTRVRKSIGRIVTMKRNSRNLEEIKPYLFRAIEESYYKLDKRIPKAIHVVAVTEDLDIVSRGRTFPHGISKETAYSESVKLLQKILEEDERKIRRIGVRFSKF

SEQ ID NO: 334 - protein, 340 aa, Artificial
  Synthetic
MIVLFVDFDYFYAQVEEVLNPSLKGKPVVVCVFSGRFEDSGAVATANYEARKFGVKAGIPIVEAKKILPNAVYLPMRKEVYQQVCSRIMNLLREYSEKIEIASIDEAYLDISDKVRDYREAYNLGLEIKNKILEKEKITVTVGISKNKVFAKIAADMAKPNGIKVIDDEEVKRLIRELDIADVPGIGNITAEKLKKLGINKLCDTLSIEFDKLKGMIGEAKAKYLISLARDEYNEPIRTRVRKSIGRIVTMKRNSRNLEEIKPYLFRAIEESYYKLDKRIPKAIHVVAVTEDLDIVSRGRTFPHGISKETAYSESVKLLQKILEEDERKIRRIGVRFSKF

SEQ ID NO: 335 - protein, 340 aa, Artificial
  Synthetic
MIVLFVDFDYFYAQVEEVLNPSLKGKPVVVCVFSGRFEDSGAVATANYEARKFGVKAGIPIVEAKKILPNAVYLPMRKEVYQQVCSRIMNLLREYSEKIEIASIDEAYLDISDKVRDYREAYNLGLEIKNKILEKEKITVTVGISKNKVFAKIACDMAKPNGIKVIDDEEVKRLIRELDIADVPGIGNITAEKLKKLGINKLCDTLSIEFDKLKGMIGEAKAKYLISLARDEYNEPIRTRVRKSIGRIVTMKRNSRNLEEIKPYLFRAIEESYYKLDKRIPKAIHVVAVTEDLDIVSRGRTFPHGISKETAYSESVKLLQKILEEDERKIRRIGVRFSKF

SEQ ID NO: 336 - protein, 337 aa, Artificial
  Synthetic
MIVLFVDFDYFYAQVEEVLNPSLKGKPVVVCVFSGRFEDSGAVATANYEARKFGVKAGIPIVEAKKILPNAVYLPMRKEVYQQVCSRIMNLLREYSEKIEIASIDEAYLDISDKVRDYREAYNLGLEIKNKILEKEKITVTVGISKNKVFAKIACDMAKPNGIKVIDDEEVKRLIRELDIADVPGIGNITAEKLKKLGINKLVDTLSIEFDKLKGMIGEAKAKYLISLARDEYNEPIRTRVRKSIGRIVTMKRNSRNLEEIKPYLFRAIEESYYKLDKRIPKAIHVVAVTEDLDIVSRGRTFPHGISKETAYSESVKLLQKILEEDERKIRRIGVRF

SEQ ID NO: 337 - protein, 337 aa, Artificial
  Synthetic
MIVLFVDFDYFYAQVEEVLNPSLKGKPVVVCVFSGRFEDSGAVATANYEARKFGVKAGIPIVEAKKILPNAVYLPMRKEVYQQVCSRIMNLLREYSEKIEIASIDEAYLDISDKVRDYREAYNLGLEIKNKILEKEKITVTVGISKNKVFAKIAADMAKPNGIKVIDDEEVKRLIRELDIADVPGIGNITAEKLKKLGINKLCDTLSIEFDKLKGMIGEAKAKYLISLARDEYNEPIRTRVRKSIGRIVTMKRNSRNLEEIKPYLFRAIEESYYKLDKRIPKAIHVVAVTEDLDIVSRGRTFPHGISKETAYSESVKLLQKILEEDERKIRRIGVRF

SEQ ID NO: 338 - protein, 337 aa, Artificial
  Synthetic
MIVLFVDFDYFYAQVEEVLNPSLKGKPVVVCVFSGRFEDSGAVATANYEARKFGVKAGIPIVEAKKILPNAVYLPMRKEVYQQVCSRIMNLLREYSEKIEIASIDEAYLDISDKVRDYREAYNLGLEIKNKILEKEKITVTVGISKNKVFAKIACDMAKPNGIKVIDDEEVKRLIRELDIADVPGIGNITAEKLKKLGINKLCDTLSIEFDKLKGMIGEAKAKYLISLARDEYNEPIRTRVRKSIGRIVTMKRNSRNLEEIKPYLFRAIEESYYKLDKRIPKAIHVVAVTEDLDIVSRGRTFPHGISKETAYSESVKLLQKILEEDERKIRRIGVRF

SEQ ID NO: 339 - protein, 352 aa, Sulfolobus islandicus
MIILFVDFDYFYAQVEEVLNPSLKGKPVVVCVFSGRFEDSGAVATANYEARKFGIKAGISIVEAKKILPNAVYLPMRKEVYQQVSNRIMKLLREYSEKIEIASIDEAYLDISDKVKNYQDAYNLGLEIKNKILEKEKITVTVGISKNKVFAKIAADMAKPNGIKVIDDEEVKRLIVELDIADIPGIGDITAEKLKKLGVNKLVDTLRIEFDELKGIIGEAKAKYLFSLARDEYNEPIRARVRKSIGRIVTMKRNSRDLEEIKPYLFRAIEEAYYKLDKKIPKAIHVVAVTEDLDIVSRGRTFTHGISKETAYREAVRLLQKILEEDERKIRRIGVRFSKFIEAIGLDKFFDT

SEQ ID NO: 340 - protein, 352 aa, Sulfolobus shibatae
MIILFVDFDYFYAQVEEVLDTSLKGKPVVVCVFSGRFEDSGAVATANYEARKFGIKAGIPIVEAKKILPNAVYLPMRKEVYQQVSNRIMRLLREYSEKIEIASIDEAYLDISDKVKDYQEAYNLGLEIKNKILEKEKITVTVGISKNKVFAKIAADMAKPNGIKVIDNDEVKRLIRELDIGDVPGVGSITAEKLKKLGVNKLVDTLRVEFGELKRIIGEAKAKYLYSLARDEYNEPIRARVRKSIGRIVTMKRNSRDLEEIKPYLFRAIEEAYHKLDKKIPKAIHVVAITEDLDIVSRGRTFTHGISKETAYKEAVKLLQKILEEDERKIRRIGVRFSKFIEAIGLDRFFNT

SEQ ID NO: 341 - protein, 352 aa, Sulfolobus tengchongensis
MIILFVDFDYFYAQVEEVLNPSLKGKPVVVCVFSGRTENSGAVATANYEARKLGVKAGMPIVKAKEILPDAIYLPMRKEVYQQVSNRIMNILRKYSRKIEIASIDEAYLDISDKVNNYTDAYKIGLQIKNEIYEKEKITVTVGISKNKVFAKIAAEMAKPNGIKVIDDNEVKKLIREIDIGEIPGVGEITTQKLKSLGINKLIDILNFDFMKIKKIVGEAKANYLFSLARDEYFGPVKERVRKSIGRIVTLKKNSRNIEEIKPFLARSLDEAFNKLNGKIPKTIYLVAVMEDLDIISRGKTFPHGITKETAYKASLELLEKLLAEDKRKIRRIGVRFSKFIEATSLDKFFQF

SEQ ID NO: 342 - protein, 351 aa, Sulfolobus tokodaii
MIILFVDFDYFFAQVEEVLNPQYKGKPLIVCVYSGRNEKSGAVATANYEARKLGVKAGMPISRAMELAPNAIFVPMHKEVYTEVSNRIMSIISSYSDKIEIASIDEAYIDITSKVKNFEEAIELGKKLKREIMEKEKITVTVGIAPNKVFAKIIADRVKPNGLGVVKPEEIEEFIKSIDIDEVPGVGNVISERLHSLGVNKLIDILSVSFDKLKEEIGEAKAFYLYRLATNSYFEPVLNKERVPHGRYLTLPKNTRDIKVIELYLKKAIDEAYNKIEGIPKRMTVVTIMQDLDIVSKSKTFKTGISKERAYTESIELLKQILQKDSRLVRRVGVRFDNIYKSKGLDVFFNS

SEQ ID NO: 343 - protein, 354 aa, Sulfolobus acidocaldarius
MIVIFVDFDYFFAQVEEVLNPQYKGKPLVVCVYSGRTKTSGAVATANYEARKLGVKAGMPIIKAMQIAPSAIYVPMRKPIYEAFSNRIMNLLNKHADKIEVASIDEAYLDVTNKVEGNFENGIELARKIKQEILEKEKITVTVGVAPNKILAKIIADKSKPNGLGVIRPTEVQDFLNELDIDEIPGIGSVLARRLNELGIQKLRDILSKNYNELEKITGKAKALYLLKLAQNKYSEPVENKSKIPHGRYLTLPYNTRDVKVILPYLKKAINEAYNKVNGIPMRITVIAIMEDLDILSKGKKFKHGISIDNAYKVAEDLLRELLVRDKRRNVRRIGVKLDNIIINKTNLSDFFDI
